United States Patent Application Publication US 2019/0183130 A1 - sequence listing, part 16

SEQ ID NO: 2 - DNA, 21303856 bp, Cryptococcus oierenis (residues 9,683,576-11,620,290 of 21,303,856)
ccttcgaaatacagaaatggtgagtctcccatccctcctgaaaatgcgtgtaccgggcgatcgctgacgcgctgtgggtcgacgctggcagtctcatcgacgatcttggaaatacccgatttcggcaacatcctgctagatgcgggagagggaacactcggccagatgaagcggcgttatgggaccgatctttgggcggacgtcttgtccaagaccaagatcctgcatgtcagtcacatgcacgccgatcatcacattggagtcaggcggatcttggaggagcgtctcaaggtaggtcatccgtccggccagagcgtacggactctacacgggggctgattttgacatcacggtctaaatgtgcagcacaatccgaccgagactctctacctggttgcaccctcgtttgttgccatgcacctgatcgaaaacggcatgcgtctcgacgatccggcaaaccagctgtgtttcatcgataactaccacctggtcgatggcgtgcgaccaaatacccgttcaccatcacgtacaccatcgccagagagggccgagggaaggttcgagggtgttgcggatgatcggcccagacagaagagtcctcgtcaaatgtgagtcgtcgtcctgcatcgcctaccccggatgagggctcaagtcccgtgttgcctcgcttgcagagccgtgcagcgtgccaaggagtgtctgagggaactcgacctagaatgtctacacacgccagaagtggagcatcgtggtcgagcttacgggttcgcggtgacccatcgttccggttggaagatagtgtgagttgaagtgttgctgatcccgaataaaacctcggactgtagctcacatcgcgatgtcgcacgcatgcaggtactcgggcgataccatgccttgcgacagcctggtagaagctggacacggtgccaccttgttgatccacgaggccactctggaagatgaaaatgcagccatggcggtcgtcaaggggcacagtacattcggtcaagccgtggacattggtcgacagtgagtgtcatcactgcgccatcgtgatcgatcatcgctaacgacggacgcgtctttataggatgaacgccaagtacgtcctactgaaccacttttcgcaacggtaccccaagctgcccagggtacagccgatcccgtcatcggaacgggacgtcgagaacaagtcgaaccccaaggtcgctttggctttcgacctgatgacactgccgctccgatctttcgagagagtgtcaggctttactgatgccatggaggagttgttcaaagaggaagaggaggaggagggtgaagcggaagtgactgggaatgggaaagtagaagacacgaacgggacgaacgggaaaccgaagaacggcaagaccgtcaagggtctaccacagggcaagaccggcaaggatgggtcggaaatgtccaattcgcagcggagaaagctggagagaaaaaaactctgggatgacaagaaagcgtccgatgcgtctccagttgcgggggagaaacgacaaagcgccgctgaggacgatgtggatatggagaggggcaccgtcaagcggacgaagagcgagaacatggtcgtcgcacaggaagtcactgccatggctgaagatgctcccgcctcacaagcggccgcagtcgcagatccttcagcatagctctcgtaacgccgtcccgtgtaatgacatatgatgacatgacgatgttattgttcagcttgaagattatgctatgccactcatcgatcccgagggtgatttttgcttccgatctagtcgtgaggtgacgaattcgacaatctcggacctcgattcgtatgatcatttcatcaaggtgaggtcatccatgatcacgacaatcctacgccgttacaaagatatcaaacactgtggggtggagaacttaggtcgagcggaatgtctgatccgactgcagggtttacatctgcatctgcggtgctcaagagcatgccgcctccagtgcccgatccttctactaccgcggtatccaacaacgactctgcgcgaacaggcccgccaacagcagcgacctcgcataggaacgcatcaaatgctcatcttcctgcagagcctttcccagaagagaccgagtcgagcgaggcaggtccgagcaaaccggtaaacaagccggtcaacgttccggcagggaacaagcggtccattatcgtcaacgcatgtcaggtgggcgttcgacgtgcacagactcgcttggggaaaggctttctcagacgtacaattacctttccgtagcgagggaatcccctgttgaacggtatcaaaggaattggctgggagtatggcgatatcgtcccagactaccaggtcgggcaaaatacctcggtactttacctcaggtgagtatttggccgagcttggccgatcgggcttgggctaattaacggctcgtgtggcagtctaaagtatcatcgactacacccagagtatctacacaataggattgagaaattacgtgggatgtatctgttaagggtattactactcatctgcgatattgtgagtctgtctagcacgggtgatgagaaccggccgcgggactgatcatccgtcccactcagagtgaacatcaagaaccgattcgagagatcaccaagatctgtctcatcaatgacatgaccgtgatggtggcgtggaagtgagtctctctcgttcgccgctcaagttgatggcggattgacgaacactcgaccgcttcacgtagcgtacaggaggcagccaactatatcatgacgtacaaagttttcgaacataaaccgcctgatatgctcaaggagcgggtgcaaaaggactatccaagtcagctacagaacgcgttgaccagcgtcaagggggtcaacaagacggacgtcatcacgctcagcaccaactttggggtgagtggactgggccggggcatcattgtaaaccgatcaggctatctaacaaatggttcggcaacacctgacagccattcaagaaattagcgcatgcgacgtcggagcagttgtcgttatgccccggactgggagatgtcaaggtgcggcgcctgatggaagccttcaacctgcccttccgaccaggagctggatcctcgaaggagcaaaaaaagacgtccgactttttcaccaagagtaagggtaagggcaagggagcgacgaatggaacgttaggtgaagatgaaggcgaaacggagatgacgggaagcaagcgaaaacgagctgagaatggggacggcgacgtgatcgacatcgatcaagcggaagatgaggacgatgaggtccaggtcctgccgacacctgctcagcgttcaaaagcgtctggagaggcatctcccgagtgggaagattccgacactgaaactcgggcgaaatcggctcgaccaccagctgcgccgagtccagaatgggagatgtcggatcaggaagaaccgccggcggacaaaggaacagagctacaatcgaacggaatgctgtcagcgccttggaaagatccgcttgctagcgactctgacgaggaagattcagaaccggcgacgaagaaggcacgcctctagaatgacgcttgtatagcacatgtcgacgaatgaggcgagtgaagccgaaggaatcacgcttgattgcataattctcagtacccataccgacttcgagctcacatctgtatgatgccagaatcgaatatttctggcaaccttctcgttcgattccctgatacgaagtcactgcatacttggctagatgggctcacattcaagacttcgggctcggccgtcaacgttggctatccgctgcaggcggagcagaagcagtcaggcgttcgcacttgtacggagaagagacccttgcaaaggccttgatctcacagtgatctttgatccaagtagacgcggctggcctgtggggaattgcttgaagtctcactttccacagtccatcagcagctgatcttgccgactctgcggaagccgtccgtccagtgcagggggagttggcgtccgccaatgcggcgaagagactgcgtggagactccgacagcagcgcaatccatgatgaacctgtgcaagtgctcatgcacctgagcttctctaattgctatgaacatcagagtgaaagcatcctagtgccaccgcttacacctttcatccccccaacaaaccgatcaggctgccgtcaaggagtcgtgctcagatttggcctgcgcacgctgcaacgttggcaccaatcatatcaaggtcgactctctaccgagaatcggacctcaggtctatgggctgatttgcagatggacctagacttcatatcgatccctcatgccatatgcggaatccggtttctagaaacgttccaaggccgctaccaatttctatgaagctgtacagagatatgaaagcaaatgtacaagatcaaaagaccgagtaccgctgtgtttcccgcgatatcatcagacttgaagccctcgatgagaggctcaggcaaagagactaagactagtatcaccacgtcaagtcaatttagtgaaacgttcaaatgtgaaacacggtcagttccgatacttgcgcagacccggcaggtttcctccagaattggaacgccttcatggtggcgcctggctgcggcaccacgagtgcaggttcgttggcgtttcgccttggtacttcccgtcttccgttccgcgagaccaaatccttcatccgtattcagccgggacatggtcaatgttccccgagaccacggcctgcttgaagggaatcgagctacccattcttacccatcctcggtctggatagccagggctatgaatcgagacagagtttctgcggatgcggcaacttttaacttcaacggagaccaaatacgacgatatgtgccttattctcgtgtctcgtaagcagcctgtggcatcgcccgaagaacagactcgcccagcaagggtgccacgaccccagtgattggcaagactcttcggtacgacacggatccctggaagctgatcagaatgcttatggacgacctggagatcatcccacgaatgtctctcaggggggccagtgactttcaggtcagtctagtttcagtgtttccgtcaaccacaactgatacatttgctcgaatccacgccattcgagtagagagcgatctgctagattgattcggatccaagatcgcccccgttcgagctgtagactcagagttcgccggtcagaatggctagaggatctcggttgaggaatcttggattcaacggcggaagtggtggtgtcttcctggactgagttatcttgggaggggatattggccgttggcaatggattgccactgggcttggctggggtccctccccaaacaatgcaggagttgccatcgcgacggtcttctcattgcaagctgtgatttctgtcaagctggctgtatgctgatattggactcgaagctgatgtcaatcagtcgattagaaggtagctgctctcgagtgagaaccagccttgctatgagcacgcccgacacctgtagtcatggggaaagagttcattgcgcaagccgtgaaacatgtggttcgctcagtgtttcggaaccaatccctgatcttccaggtacaatgtcgatcttcgtaccgtgtcatggatctgacctctggcctctggcctctggcgagccaaagcaatcgagtctcgctaaacccatccaagcaaagatctgctcgctgctcgggacctgacaacagggtcgcatgcgggacattagtgatctcgccaggaagattcacatgcaagcggcggtggatatggattgcttccaaccgctatcttatctcattgatcccgtcgatcgtcgtctgtcgaggagtcctcaaactccttggttccgacgcgagttgactggatcttcggccaagaggacacaactgtcccggtcacgaatctcaagcgtatcaccaaaggcgagaggtcacgttatgcagaccgaaaatgttgtctttcaatttttcgaatacactctgcgacgacgttcttgctacgctctgagctctctttccccggtcgacctcttgagtacgatcgaccaccatcgttcgggtgagatccgcattagctcctcttgacgcgtccggcgcgttcacggtgatcaccgatcgtggccctcctttctgcttctgtgcctgaccgaagcgggacgtcatccaacggacctcggccgtgtcgccccaccgagcagctgagacggcgctaacgaattcagagagctgatgatgatcacccgggccggccggcgaaaagggatgacctctgttttcattattattgaccttagaagctgaggaccgcggcgacctaacaagccgcgcacagcacggcgcgactcaggctcaatttgaagtaaacatctcttcctcaggagcaagatgcaggttcccgatgatctatggcccaacctcgaacaagtcgtgacgtgggctgacgatccctaccccgtcgagaaaatccgaaattcgccgattcccaaggctacccgagaacgatcagccggggggagacgaaggggggagacgcgggtcccggtggtcggcctgttttttttacgcccttgcgaaaggactgatcacgcatttttatcaccgccgctcggcagcttcacaatcatccctctcaagactcggctcgcttaaaaatactagactaggctcagggagtgtgatggccgttgtggtatattcatcatcctcgactcttgtctctttatcgtcgtcgtcgtcgtctttgccttctccgtcgactcctatcattcaatagcacaacccgataacatagagatttcgcccgagcacctgacaagtcgacgaaaggttgtgatccttataatttcccacagggcttgcatcacgacccgctcgccgttgatcccaccgcgatctcatcgaatatcaccaagcacggagaaagaattgtcaaccgtctacattccagcttcaccttgggccagtaaccatcccaccatcttgaccaagcttgaaagcgagatcaaaccggaaaagatcggatccttctacccctccccttcgccaaagtcgtttcacctcgtctcgtctcatcctcgaaaggcgcagaagtcacgggacagggcgagatataatccaaggatctagaggttcagaaagatccactcttttgagccggcgacccgtcgacgtaaaggacctcctttgggttgggtgacccgtcaacaacaacgatcacgccgccccgttcctgcccccaataagacgtcatcgttggaagacgacgacgacgatcatcaacacggtcgaaagaaatgtcgacgcatggaggagggtaccagacgggaccgagttcgaatcatcattatgacggaggaggaggtgcagcggtcaaccatggcggcgggggcgtaggagatttgtgagtgactggggtcttgtttgtggtttggctctgttggtcgtatggtcgtggcgaaagattggagtcgaaagtcgacgtgggctcttcttgatcctcctttggatcaggaaggtgccggcgggtatggacaattgatggcttcggcgcctggttagagcgaaaggaaagaatggtggagccaaagtgaaaccgtcctttggccacggcgtgattgatggctcgggtggtcgatggtcgtccggtggatcgatcaaaacaaacaaacaagatcatcatcaacacgagatcatttcatgtctgccaggcgagaagggtaaaagtgaaaaaaaaaagttggtcgacggtgacaccccacatcgtcgtcgaagtgcgagggacgggggaaacatttacaagaaaaaaggcagacccgtatcaccggctcgacgagaaagaaagtcctcgacgacgtcgcaaggttatacataccggaacctcaccaagcgaaaagctagaacaaaaaaaccgaaacacatcgatacagctcgtcactaccccactcctcttcacagatactatgacctctgctccggttgggccgatgctgcctatatcgtctgctcgccagagctatcgtgctgacctcgctcgatacgattccgaccctcatcctcaatccgcaccaccgcatcctcgccgacaccacgccgctcctgctccccgacatcatcgcaatagctacctctttgacgcccattcgagttccaactcgtccccctcgatggcgcacaatattccttccagcttccaacaccagcatcagaaccagcattcgacttccgcacatcaacaacagcatcagcatcagcagcagcatcaaagtcacaacaaccacagcaataacaatatcacgaacagcaccaacaacaacatcaacagcaataccaacaacaatcatctctaccggactcttcctcatctgtatcaatcgcaacaagcacagcagcagcaacagcaaacctcctcggcctaccacccacacaccaccgccggtaacgatatccctccggctccttacacctttccaccttcggcgaccggactcctctcgtcgctccattcttctcaggcgaacaactccaaccagccttctccctcgcattcaccttatttggcgtacaacccttatcccgcgacgacgaacggatcagggtataccccgcagtcgaatttcctgccccagagtcagactcagcatcagcagcaaccgtcctcccagccatcgaacgggcagaacggtgcttatgcgacatcagcgtcagggagtaggcacccgagttacaccggtttgaaagctagtccggggcctggtgcgggttcgggaggatccaatggggattacgtggctgcgtatgaattggccgtagcgagcgccgtggctgggaatttgagaggagaacatgcaggtgagtttcgaacgtgctggatcgcgcgggaaggatcgcacatctgaaaccgtccccccgtatctcgttggtgatacagggcaatacgcagcgagtcccctatccctggatcacctttccttccggcactactcccgcccgacgtctcctcatcgacacctctccctcgacccccgttcgacgatacataccgcgatcaacacgcccgacatctcgcccgaccgatccgcagcgtctactcctggaatgagcgcacacggctcccatgccgggtcgacgaggaagaccaagtacacgcgaagccggactggttgtctgggatgcagggtcaagagggtcaagtgcgacgaaggaaggcccgagtgcaagcgttgcgtgaacgcgaagcgatccgtgagtgtcgactcgtttggcgaaagtgtttttcgatagttcctgaagttcaaggcgattcctttcttgcttgacatcacggtagtgcgtctacccggcgctgcaagatctgccaaaggctacgatcagggcgttggctgccaagaagcgacaggactcgggggactcgtcaggcgaggatgagatgccgagcgataggaaacgcgctcgagtttcagggtgagttccacgtgaccgagcgagatgaagttttggcgttcagtactgattccgacgggtcgaatttcgtcattgcgtcctactagaagcgctggaggagagacctcggtcgatcactacatgaacttgatcgatgatgaaggcaacgtcaaacacggttacagtcacgccagcatggatcagatcgggaatggcggtgtacaccatcagtcggccccggttggcggactcggtttcaaccctgcgcctccaacaactgcggcttcctggaccgctcagcataatgggacgtacggatcgcaaggcgactacggtcggatccctcccgtctcggcaccgtcgtacccattgtccgcgcaaggatattcgaactcgatctcgtcttatcacctcaacgcgaacccagcgtactataatggtggtggagtcaatcagttcaaacagcaaccagtactatcgagtcacgatcagagggtgacccagcaattgccctatggtcagcaagcatatacgggccataatggtgcctccatgttggatcaccattcgaagcgggccgactacgggaacggtcatacgtcgacagccaatgcgacggccatctcttctccggacgacggtgtcggctcggtcgacaatggcctgatcgctcatcaccgcacgtccgactctcaatacctttcggatatcagtcgcttgacttcgccaactctgaagaggtcagcgttggctggggggaatgcttaccatttgaaggaggatgcttgaaacgttacgcctttccccggcgtattcaggtgacgtcggacgaaccaaaagataaaaaaacaaaaaaccttgcatgaatcggggccttccgcccgattcgataattactacctacctagattttctcgacaaatacttgtatttatacacctgcacacaatatcttcgtttcgcttctgcattgccgctcctggacgcacatgaagatcgtcacgatcggcttgggcggatacaacctcgcaagcggctgtgtgcgcatacgcaaccacgatctaatctaaacgaaaccccacactcgcaagggtatctaaccgaaatcgcgccccataagcggcgggtcgttcgtacctcgggcctggtcagctccacgagatattcgaacgtttcacagtgtcgtaagtcaagcgcttcggatcgtactttccttgatgatagcctgaattcctgttcaagggaagaagcgatcaggatccggcagctcagcccttgcgcttcagcccagtccgaatgcgctactgggatccgaggtcaacagatgaaacactgtctatttcacacccagtgccgtattcaccaagacgtcaaatatacagatacctttgaaacaaggtagtttttgctcaagggtccaggaggtaatatctccctagtgccttcggataagctcagaagttccacaggccacacgcatgtcgcctgctctgacccttcctcgattcacgtgaatattcacccacaaagcacttgagtcgatcgcaaacggccaccttcatcgtctcgtgcttaaaccgagaactgccggcaaagggtggtagaagaggaccgtttctccatcccgtctttccccaacaaccctacgtcaatgggttcccctgaaccaagtttggccagttggggttgacgtggtttgagacaccctcgtgaaccccaaagaaacgatggaaaacgaggtgttcgaagcgtttctggccgctcttccagccaacaagctttccaagatcaatgtggcaaccttggcaacggaagatgcccaggccgcgccacctacagccgatcccttcgtaatccacaatgacatcttggcgtatctcgacaggatgacgccgtagcatttggcattgatcgatgtggattctcacaattgttctgaaatccttgtccaaaacgcatccgtacaggccgaccacgggctcagcgcaaagatgcttggctcttggccatcttggtcatcggaaagcagactgtggctaatgaaacggcaatgagcatgggcagggacatgaccgcagtgagagaattgagggagacagggtcgaggtcgtccgccggtcacctcacaggagcgtaccagaggactatggagaaggcctcatagtatcgcctttcttttgacggagcgattcgttgacgtcgtgcgaatctaggtcgggatcaaggtcggtacttcagtcgctgaaagttcggatggaggtcccgaggagcaagcgcatcaaaagggccgttgccgagatcgtcagcggaagaaaggttcagatgtaggagtctcccggtaacgatgtgaaacaacacgacctccatcaatcagataaaatcacctttgacctcccgtctcgtgcttctccaacggttgaagatggggatttaaatcgacttcttgcagataagcaggccgttctggcacatgcgcgaccagccgaggcacgctgtggttacctttcgatcatagttgcagccatctccccatactaggtgattgctcaacgaaagtcgtaaccattgttatattatatcgggagtcaaccttcacacaggtcaaatccatctcccccaaccattcccttcgcctagattggactcatccctacctttttccgcacttcgaccatcgtccgtctggccaactcacccgcacgtaccctaccctcctctgccactgaactcaggtacgcccgatcttgccggatcctcaagtactcttccctgatccctcggagcttctcgacgacggcgttggcgacgatggatttgagctgggcgtgagaagcgatcccttgtgatgacaaccgagcggcgagggtggacatgtgagcgtcgtaatcgttggtcgtcgttgtcaccgccgtagattccggatcacatgcgtcgaggatacgcaagaggttcgacaccccgcgtcgaccttcaggttcccacgagagggatcgttcgctgtccgtcacggcgccgcggatctttttggagatgacctctggcgggtcggtgatcaagatgcgcgagttggggttcggtgcggatttcgacattttctgagtagggtctgtcagagacaagactcgtttcgaaggtgctgtatcggtgcgcaagcgcggtgccgtgagcctacggtcgcatgttatcgttcgagtaccactgactgatgacatgccgaggcaagggaaagacgtcgccaaaccgatgattaaaagtctgagcgatgtccctcgctagttccagatgctgttgctgatcctcgcccacgggaatggtcgtcgatctgcaatgaggtcctgttgagccctctaggtcatgaggtgcgcgagaagcacaagccgaggactgacttgtagagcatgacgtcggcggcctgcaagaccgggtaggccaacaaccctaacttgagactctcctccatctcttcctcagcggctatcgactcgtgtccaccgggtttggcgatcgagagcttggactagggcagtgtcaagcgtgggtccgggtcagctctctgaggcccggctttggagtcaatcatcgagacctggacgtaccttccatgtagtcatccgttgtaatcgaccaaccccgacgagcgtgttgaggtaccaagccagttcagcgtgttcaggaacctagagacgtcacggtcctcaattgagcaaaagaccccaacccgcacgagtcatggtcagaggtcacgcccccgactcacatcctcctggaagaacaagatcggctcttccttgccctccgggttcaaccctctcgctcgactccccggtcccaacccgcaagctagcagacaagccagagcgtcccgtcgttcttccctaagcttcttcgggtcctgcgggagggtgatcgcgtgcaacccgacgatcgagtagaggatccgaggtggggtggacgaggtaaacgatgtggattggagggaaagccaattttgaatggctcctaggtagtttcctagctaggtccgggtggatgaagttgggagtcgaggacgaggcaaagatgagcttccgaggatagacggatgaatgttgactttgtgcgggtagggagggagacttacatgtggaatacctgaatgcggtacggaacatgcattgatcagttcaagtcgctctgcctagggattcatgacctgacgtacctgtaggctgaatgccggaaaagacagtctccctatatcgtttggatttgacgggaggagtttgctgaagacacctcgacgatgagcagatcgtgcgtcgattcatattccgcatggccgtccgcgctggactagcgatagcggtggtccatgccaatgtctgtgaattgatcgacattcccataacgaggactgggttttcttatgaggtgaatggttcgcctgctagctgctggcaagatgtacaattcagagtgatgttggttcaaaagtcccgacgatgatcgacaactactcgacatggacagggaggtggaaataagcagaaaaaataggtgacaacatgattctgttctgatcctcatctcatctatacatctatcgcgatcaaacaacacacagttgccatgtcatgttgatgcgagtgatcagaaccggggcgctgacttgaacgccagtcgactacaccctcccggccgcctctggaccttcactagcgatcttgacctctaaactctttatccgcctctcgaccccgtccaactgcctcatgagttgcccgatatcaaccgtctgccccgtccccgctgccgatttcgaatccgcagaagaggacgaggaggacgaggacgactctttgccggaactctcgggtcgggcctcaccccgaccctcgagcgcgtacctcccgcgcatcctctcttcccacgccgagaggtcggcctgcatctcgtcgcgctggcgttcgaggatacgaaggtattcgaagtccgagatcttgcgcacgggggagagggagcggaaaaagtcgaccaggcgggtggacaaggtgggaaagtccgaggtcgaggtcgagtcgggtgtagacgggggtgatgttgacgttgacgtggatgacaaggccgacccggtcgaggtcgtatctgctgcagagcttgtctgctcagacgaccccgcgatcattcccaccccgcccgtctgcatctgcccgacctctgcttcctcctcttgcgccctccgctcggatgaacgccgggcgagcaattccaacctggccactctgatattgttgaccacgtattgaccgaaagccgtgatcaaccccgaagtcagcgctgatcgggggaaagtcttgcggccgcctagatcacgcaaagatcgttgttttttgtgtgtgtcgagtcgccgtcagtcagccagacagacagtattgggaccagcctgattgtcagaggacaagaggagacgtgcaacacgagactcacggaacgtccaactgatcatcccacccgtcaaccccccagccaaagctgaatccaataatcgatcgttccgaaccctcgtcaagctcgacgacgacggcggcggcgacgtgatctggtgctcgacgggttggagagaggcgctccgcgcatggtatgacgaggaatagggggagaggacggtgaggagtagaggtgagacgaggtattctcggattcctaacctggacaagaaacatgatcgacgtcgtatcctatcagctcgacgactctttggcgccgcgtcgcattgacgaggaagcgggaccgggcggggacttgccgaagaatgtcaaaccggcgatggacccgttcaatcccatgttcatccccagagcgtacgggttctgggctttgaacgcagcgagggtcgacccggtggccgaacccaggacggctgtagagagttcgggcgaggtcagctcggggatcaagtgcgaggtgcggggagggaaggttcggactcgcctagcgtcaaggtaccctgggcgatgagaaggggagattctgggtcaaagttttgcatggcttgtcctatgtatgaggtgtttcgtgcagatggtaatcgtttgttgtcattgtgcatcgagtaaagagatttcaagatgtttgagctcatcaagtgtcgcaagttgatggatggtagcttgatttccagtagttttgcttccgaacaggatctttacgtcatgatgtcgtcaccctcacgcaatcatcacgtatacgttacgtcatggtatctcgtcatccttcggcttccggcctgctcccaatttgattccgatgtttttcctaattcccgatgacgtcgttgatcgttcaagagatcgagcgcgagcggcactcactgtgagaaatataaaagagtattcaaagcataagcaactagcattaccatcgactactagctactacgctactaccttacatacaatcacaaacactctcagaactcgcattcaatcccatcactcgatcaaccttctctctactcaaaatgtccaactctgccaccaccctcggtctccgatccggtctctttgaccgaaacctctccatcctcgccatccccgccgtgagtcgggtttttcgcgcttcaacgaccattcgctttgttcggcaaaactgacgacccgtacatctcgacccgatgtagacctttgtcgtggcattcttgccccacaccgtaaaggtcatcatgctcggagacaggttcgacaacgaaaagcccagggcgcccaccgacttcaaggtcaccgacgatagcatctaccgaagcaagatgtgagtatcgtcgacggcacatcctttatcacatccgcgcagaagacatacacgtcgatgctgattcgacaaacgcctgatagcaaccgactcgctgccattcactcgaacgggttggaaaacttccccttgttcgccgctgccgtcgtgagtccttcgacgggttcgacatcgtccttcccgagctcgagcttatcatcatcatcatcatttccaccccctctttctcccccgctccgcagctcgccggaaactttgcccgactccccacccgtctcctcaacatcttctccctcacttacctctcctcccgagtcctcttcaactttgtctactactcccaatcatcgaccaccggatccatcgctaggagcgcgagctacttcggagggatgttgggtagcttgtggatcttgatcaagagcgggaacaggttgaacgagttgctctgagcgtgagcgagaggtcgacgtcgacgttgggaggaagagcatgagggagaggagaacggtaattaggtactcttttgtagccaagtataaacgtcatgaatgaatactcttgaagcatcgactctccccccgcgcccttggagcgggttgaaccctcaacccggtggagaggtcgcccgacgaccccctgatcggaacgatcggactaggccaggctcctaaagatcatccgggcaagcttgggagctcgattccactacagacggtactcatctgccgcagcatgcccatcctgcctcgttcctcggaacgcaagatcgtcgcttcgacatcgcacgaatgaaacaggacaccttctgggggaaagcgttcttgagggacgccttgacaatgtactagtacggcctcggtcttatgggcaccgcgtaccgcatgtgaagcatctcgaaccctcggtttctacttgccggccagctgtttcgatatgcacgacaaagtgtagcgtggggacgagcccgattacccgaacagggtagagcagcatctccctctgatggtctgtacgatcagcaagtcccccgtctaggcgtcagcctgcacagcttgcagggcggaaggttgtcgggttcgaatgggatcggttgtacctaaggaggtcaccacaggatggaatcgccgatcaggatcgtgtgcgtagtcgggtcatcatcatggttcgctctcccaatcggatcgacggtctctgtcccccagagggacccgtcggtcgtcgatctcaaatgacggatggttctcacgtgcccgcttgctcttctttgatcctgcagaattcgaatagatcgtgtgcgagaagccatgcggattgtgtagcgtcaagtcctcttgacctatcctggtcttgtgtctctcgagcgctgcacttcatcgcgggacggtcttgaattgacgctgcatatgggttcaaaatgttctatagatctgcgtcaagagggacaggatgagccaggggcggcggtgacgataacggcgacaatgagagcaacattgacaatgacgaggagagcgacgaggacgaaagcaatgatgagaagacagacggcctcgccagacccgctcgagtaatcacggtgagtcttggtttggacgctgtatttcccaggctatcgagctgagatggactaccacgtgcaggcgcgcaggcgtgctacagaatttcactcaatcactttggtctgggcaacacatccgtctatcgttgtgatggacactctacagctccgttctaccgagcgcttggacgaccccctcgaggatcggctgttgtggacaaatcgcatgtcgactgatcgacaaaaccttgcgatgcgttgttgacgcggctctcttcgggccacccagtttgccaccacaagtatttggttatccttcgacaacttctactggctttaccgcagattgggatctccagacaatttgcaccgcatgctacattcatgagcgatctctgatcttgcatggccatgtccgaccagggcccaccgattttcaggacaggtacactttagccaggcgtttgtcggaatgtttctcttggtgcgcgctagtcgtatccttatcgaacgtggttgttcaccgtcgacggccgccttcccgactcgattgtccgataggatcggcgtcgacgcagagtggcactcggccgggtaaggggacgtatctcgctccgtctagtattccgaaatattgggtacacgtgcaaccaaattgatgaaatcttggatagcatcgacgaggtcgcccccggcgagtggaacaatcgatgggtacctgacttgactagcgcgaggaaccttttcccggtgaattcggtcttgaccggacctcatggtgcgaacgttgttgtttccgtcaagatcagggtatataggcagctcaatcacggagcaaaactccatctgccatgagagacgagatcgtattctggcaatacaacgcagttccatcagcacgcaacgtaaaaaaatgctgcggtcatatttcttgtctctcttcgcggtcctcctggttctcggcctggtcaacgccgccccgcgcgcagctgctcagctcgagtcgacgcatcagctcgaaactaggacgatcggtcacatctggtcggcactcgagctgttcttgtatcgtcttacacatggaggacagtacccccctggatacggtcaaactccggtcacgaccactactagcacatccagggtgagttgccaaaagtaggatcggtcatttttttgcacgtttcagccattgactctcggtttcatcgccggcagcccgtcagcacgtcgaccactgcgactcagagctccgtcgctgttagcaccactaccgtcgcctcggctcctacctctgccgccgcttccagtacctcaatcgctgtgagtcaaattgcctgttgcaacaagcgaaagacatcgcgttttaattctcccttcttcctaccaaagtcaacctcgacctcggtctcggttgctcccaccccaaccggaaccggtctaaccgtctgttccgcccaaaacctcgactcgttcgccgtatcgtgctcgacctcgaccccggccgatagctgctgcgtagaatcccctggtggacacctcttgctgaccgaattctggaacacgggcgctgattccgtcggacccaacacgacctggactgtgcatggtgagttcgggatcgaaaaaatcgcttgaaggtacaacgtcgttgacgagagattccgattccaaacttcaaaggattgtggcctggtaagtgctggttccttgacatctgcgaaggagccagcaggcactcatgaaggcctgtgttcgaacagacaactgtgacggatcctacgaatcctactgtgaccccgctcgagaattgcaaaacatcaccgtacgtgtcgagtcccggctcggctttgtttccctttgttcataccttgtcatggttgtaggccgtcatcgaggcttccggcgaccaagagctcttgagctacatgaacaccctgtggaagagcaacaacgggaacgacgagagtttctgggagcacgaattcaacaagcacgtgagtctaccggtatcactggggaagttggtgcattcgatgagcgggctgctaacatcagctggtgtgcgtgactggacagggcacttgtctttctaccttggaacccaagtgtttcaacaacgtgagctcgacccagctttcctatttcaggttgacacatctgacgcggtctttctccaacgctcggcggcactcttcagttccaacctcaacaagacgccctagcctacttccgaaagaccgtcgagacgcacaagaccctctcttcttacgccagcctggccagcgcggggatcttgccctccttgacccagacttacacgttggaacagatccaggcggctttgaccaaagagcatggtttcgaggtcaacgtcaactgtcagggttcggtctttgaggagatctggtgaggctgcccttggcgatgatgtgaggttgtaaggtaagaggagaggaggctgatatgcgaaacgtggtgtgacacgcaggtatcattacaactcgcaaggatcgatcgccgatgggagattgatcccggctcctcttgtcggcagcaaatcgacctgccccgtaagtcggcatcgttatcatgtgccgccctttttagcctttcgggactgaccggttcggtttcttctggtcgtgtccctgtagagcactgggatcaggtactaccgtgagcaattctcttcctttcggtagagcgcacgccgagccgagattgacatgctcccgacttgctaaccatagccaagtacacgacgatctccgccgaacaacccgtaggctccgtcggcggtggcaagattgtcgatggaggcaagatcttcctctacgccggacctacgaccgcttacacggccaagaccaactatttgacctctaccggtgggtcatgaagttcagagctcgtcaccttacacccgaggtccatgtatctgatcatcgtactctcgggtcggtttaggtaaatggtacgcctcgggaaccccggctgggtacacgttggctgccgttcaaggggggagttacacgttgaccacgagcaagggtccttgtgctatcgaccccactaccaagctctttggatgcggagccgacgtcaccaaggcttccgagtttgtctttgtgagtcaccgtatcgagacaaattctgggatcacgacgagtagactctgacagccgttttgtctgcgaccgacgacaggccgaagatggatcattgactctcggaggttcgggcgcgttttcggcagcgaaatcgccttcgggtcaagaacaaatcctcgtgtaccaaaacagcgacaatgccgtcaagttggtcatcgttggaattgctcagtagggggttgtagtttctgtaatgctgaaaaagggaaatgtgtatacgagtatgagaaaagggtagaagtagatgatgaatcaacctacagttcgttcgtgcgaatagtctgagctctacgatgatggttgatgacgtcagcagcaatcgagcgaagacggggagatcggggaaatcagatcatgatatggtctataccatcatcatgttcatcctcttgcatcgactgctttacctgaccttacacaccggtcggatgttcagtaagatcatctctcgaacaactcgaacaactcgaacaactcgtacaacttatatctgcaccacacgacactttacccgatcgaccgtcatcatgtctaaacaacaagaacccagagtgatcgagagcatcgacgttccaggagatgggatgaagtgggtcaaactgagaaagatcaactgggaagatcagacagggagaaaggtacgaaattgcgtcttgtgatgaccgaaaaggcatcgctgatattgattctcgctttcatctcgttgcagcgagtctgggaagccgcagataggtccaccaggaaaggagacatcgatggtcagttctgcacttctcaagactctttctcgttcatgccatgtcgacggctgacaccatttcacctgcataaatcacctcttggtatttcgaccatcattgacgatacatagcggtcgccatcgtcgccctcatcgcgcaccccaagaaaccactgtgcacggtgatcatcgagcagtacaggcctcctatcgaaaagtacattatcggtgagtagttctgtttttttttgaggtgtgcggatggcaggagagattgactaacagcggcacaacgtcctgttcgtttcttgcctcttcggcaatcgcagaacttcctgctggattggtcgacgagggagaatcggccgagtgagtaaaccctcgctttcaccttttcgtagacctgggatctcgcgatctcgcttccgattctcatctcgtcctattctatctcggcagaacggcagctttgagagagctgtacgaggagaccgggtatggtggaggagacaagggcggcggcatcgccaaggtcaggaccgtcactcccatcctcgtgagtcactcgtctacctccctcttccatctcatctagacgacgatccctgtactcacccggccacccgcgctcgtcccgatcacgtcgatgtcaggtctcggacccgggattgacgagcgccaacatgaagctcgtcatcgtcgatgtactattgaccgaagatgacccggaacccgaagccaagctcgatgagggggaacatatcgtcaaacggatcgtcgagatgaaggatttgtggaagacgctcgaaggtcagtcgacgtcggtttcgatgcggaaaccgtgtgaaagaggtctgcccgactgacgtaccttacgtcgcctgctacccgtccccgcgatagattactcgagcaagggattcgtgctggatgctcgcctctcacacatcgccatgggattgcacctcgccggacaactcgaaaaggagtagaagtgcagggtacggtatccaacatgtcactccattcaaaggacgcggaagaaagttgtatttcggtcggatataagttgtcggattatgaattgttggctttgactgtcaaatccggccctcgtcgttcctcccagagagtctcactactgaatctttgtcgctactatccaatctatcgaattcgctgccatcgtccactcaagatttcccaccgatggagaataagccttttttgactcccaagcttgacctaccaccatggtctctgaaccaagaggccgcttccggacgggtggtctgtctgtaccgaaatggtaccgtccaaatgggcacgattatctgtgaagagcatacggcccgttcagcttcatgcaggtcggtttcgcccagcccttgttacgactcggcgagatctttgccgcagctcggcatcctcagctattcaagactttgcttgtcagcttgaccttcacatctgtcttagatgatcctccgaggacagtccatcctctgaaataccggctccttgaggatgtcacgcttgaatttgcatattagattgcacatcattattcgtcatcaccaccaactctcgaccttgacattcccatacgtctgcattttatgacgcaagaatatcacgtctagctaacgcagctgatgcccacatcggcccaacgcgcacaccaccaaaaacattataccttcctccgtttcttccagctgttttactcagtcatgccctctctgtacaagactcggatagcccttatacagaataatacgctgtcagaacgaatgcttcaaccttcaagtgaacaaacgagcttcattaacaatgagcttgacacaaggtcatgatgaatttctgcacagaaatcgtgaggcccactgaggctattgatacgaaagaggctcacagtggagcggacgaccgatcgatatgaagattcttcatcggatctggtcttcacgtcaggtgaatccaaagctaagtcggaagaaacgtatgtcttgatgtaaaggacgtataggaaggttgatgtttcgctgcagcgagatcacatggcgtatcgacgatgctgcaagttgttcgtacctgttccctaaaagaatgagcgttcgagtcgaggccgcgtgtgggatttggcttacttcttaatgggacagctgataccccgccgcctttgataccagatccacctccattctggttcggaaccctaccatttccgccattcgggatattcgccaagggctgcctctccctgcctggttcccctcctccaccggtccgtctctgcatttgtgccaaattctccctcattttttgctgaccagccgtgttgttacctcgaacatctctcgcggattccctcgtgtcgaaagccggagtagcgttgccgaacccgtgattgctagtggaagcaccgtgcgagacgcccgagacgccgtaattgggtccgtgaaatcgggacgacggatgcgtgatcgggccgagtggaccgtggatggtgtgagattgtttagaaccaggatcagagcggcgggatcctgtaccaggtggaactgtaccccgagtcgagcctcgaggagtggccatgaagggagctcgattcatgcttgcctgcgtgggaggacaggcatccgattagcgcgacatgtttcaccgggacacgttcgatcccggccatgtgtaacgtactccgccggcatatccatgaactgattcggcaccatcatcctcgttgtcaaagaaaaactgcccgttcacggcttcttgcaaatccatggcgttcccgagaggttgtttcagcaagagctagcggggtcgcaaacatgccacgtgtcacatcagccttcaatatcagccagaggcgatcccggtggctttcaggctgacctgacgtttctgagtacacactctgtgcagctcgtccttgaccgccttcagttcgtccgaaattttgtagagatgagccttttggtgttccatctgttccctcagcttctgattctccctctcttgagcttgtctgagctcttcggctgtttgtgtgtcgaccagatcagcgcggacgtggtttatccaatttgagcgacataactcgccttgatgtaactgagcttcgagaccgtgaaccctttcttttgcttgattgacaacatagtcttggaaagctctacgtaacgattcgatttcgaaccgatcactgcctgaatgccaaaggacctccctaatcgacctacgagagttggctggtctgataggtccagaacgacatggccctgtagacgtatgaaatttggtcaggacccgtctttcataccgatgttcgaagagggctaaccgttgagcgatttccaatatcacactaggtgagagtccagatatgacagactgaagggtcggaataatgcctcatcagcgatggcccaagcgagagcgacatcttcaccgggttcaactcactgccttccactcggtgccaggactgagtgatatggcctggttgcgcatgcatcagtgcgagtttgccgtagagcagagagtcagtcgcaccgtgatctcatccctgttaaggagaaatagtcgcgatcgaacgacagtcagcttcaaatcgagaatatcggtcgctcgttgttcggacatgaccgaatctagcgacaactcactctccgggaaggtgaactccgcatgtaggacaaagcctgtcaaatccgatcagcgaggtagcacaggatactgagatgataggaggacgagatcaggaagatccgggattaggaggtctggaggcgtaccacagaagatgtctacgaaagtcccttcagcagatattgcggacctcctctctcgaccctgatagactcacgagaacaattggtgacgaccgcctgtccctgggtagacaaagggactcggcatctaaggacacgaacatcacgagcttgtcaagtacctctgcttgcgccgagatcgccggccgaggaagctcacctgaggttgttgcacaacaactcgatctctttcgcttcagccatgatctcaaggctgatcgaggtttcgccgagacagcgaacaagacgatgagtagtgtagagaggtgaaggagatatagtttagcagatgatcgaacaagttgaatcaagaggctggttgagattgcttttgggttcgacaggatgataggtgcatcgtatgatgatatgtcaatctgatttgatcgagggtggacaaaggtcgacacgacttcggtcgcgcagacgatcgaccctcgaactcgggatttggcgaattgttattatcgaatcgagcaagttactagcattactagatacaggacggcaccgtgggcgaaatacaatagcatcgacaaacaatcaacggtcagcttcgagcctgatccagagacccccatctagtccgtctgcataggttcggccgccgttttgccctctctggaagatgcaacgcaaataccatgttcaatccaaacgaccacccaccctcgaccccttgtcctcacatgacgacagactcacttttcaaactcgaggctcttgttatagtattcgttcggatgcgtgaccatgtctcctccaccgagcccttccccctttttgacgttgcccgggtgggtcaactcgaacaccctcgtacacgccacatggtagtgcgtctttttcacagagtccatgacgtcccgcatctcgagcgagcctacctgaaggatcgggtaggcttcgacgaggagctgttggagctgttccggggcgaagtggcgataaggacatccgtgggattcttgcggtccgggcgtcggacccgtgaggatctgttgacagctacacaatggccaaagacgatggtcagattcttacctccttgatcggatcgaaccttcgctcgaggtgactcacctcttggcggggtaattcgtccgctttccctcttgtccgtacgaatgccggatattatacttgtactccttgttaaacttgtcatccgacatggtcaacccgaacccgcgcctccagtagatcaaagcctcttccaagggcatccccagtgcctatacgacaagcgggatctgtgagcattcgacggcctgcccaaccctgttcccgccgactgactttgaggaaaagcccgaattgcaacctcccgtaatgcttcaaatgtcgatcgcgtttcaacctcctccacaggttgtactgacaagcggggaaatgcttgctagcgagcgcatcgaccatgtcggccgtgaccttttccgaatccgggtcattttccccaaagaaattgttgtccgtcgcggaaatgttggtgaggaacgagagcgagaggtgcgagaggatgggcatgagacggtcgtcttcatccatccggggcaaggatttggccgtcaactggtacgcacgagagacggcatgacgtcaataggtgtcgtgccggcgtccgcaccgagcggagtctgcgactcacctcgagagccttgcctagcctctccctgaaagcctgtagtaccagactgatctggtaagcttgcgggacatacgcattccctcccgtaatgtacacccgtcgcgtagagaccaaatcggggaccgtgtaccacggcacctggacgagcgcaagaggacgagaaatccacatctatcagagcccgaccaaggtagataaaggtggagcacgagggactgaccttgacgtaatggtccgtcatcacttgagactcgttggcgttctttggcaaacacgaggcgagttctttcctcaacaaggatttctccgccgcgtccacctagtatccgacgcatgtcgtatctgggtcagtctcgcgtgacaatgcgggcgagacgcgaggcaggacgatcgatcactcacggtgacccagtcgaattggagacttttgaggaattcttgcttctcgttggcatcgtccgattcgaaccgatgtcgaaatagctcggcttcggtcttgatgaacttttctcgcaagtccgggctggtggtcgtcgattcatgtccggatcgaatcaaggtagtgagtgtgatgtcgcctgatgtcagtgaaagtagagcgatgacgaggacggcgacgatacccacctccgacagaaagccagccttaatacccaatgcccaacctcgtccctccgtcgctcgtcatccagcttgacgttcctcgccgtgttactactcaggtggaggttctgcttgatggtcgagccgaggagttcgcggtactgcgagggagggagtgaacggtcggctagcgagtggatttgtgtgaggactgcgagtgagattgagatccaaatttgagggttcagtcgggctcgtaatttgtgtggggggaggaggtatagacctgaacatgggcttacctttgagtcgggcgatggcaaagatttcaaactcttccagcgtgatgtccatcgacggcggtcgagagtaactaggtcgtcatcagaacagcaaaacacatgcagtggttagtcgacaagtgctctgaacgatccctggtcaactcggactcacaagttcaaacggtaagggtaccgcgaactaggccccgagttgctcaatcgtcggttgattttgacctcgggtgctgaccgggaggaaggtccggcttgcggagttctcgacgtagctttgaacatgatcttcagagcagtgttgcaggtttacgtatgagacgacaaagctgtgtctatgctgctacaactagagtcgatctgatgttggttgtcacacctacagtacttcttgaccttgcttgaccttgtatccattcccccaacgcgtcgcgtcgacgcgtttgttacgagatttctcgttaaatgaaacaagatgagcaaaagtagaagtggtatgatcggtatgatatgggcatcaggccatcaggtagatcgataattatcactccagttctatccacggcccaagtaaatgtgtacaagggtgagaaaggcagcttctagaatctgatatcacaaggtatcagctagttatttgccgtcatcaaagtcaatctatgtacctgcttctgacgtgcacacccgccactgccgctccctttcacctgaccaagaccaccaagcgcaagtaacatgattgcctcgcctagcaatcgcaggaccgtgtctctgccgtctctcatcatgatgccgactcgcgactgtgcagtcctgttgatcaagagcgatgaggataattttcattttcatctctagaccaaacgatttttttcccttgcatatacaacctggaccatcttacaaccccccctcaatcgagaaacccgtccgccttccattgatccacccacaacttgaccaacgactcgtccaccgccttgcactcccttatagtcggagctactcgacccgtctccctcgtctcgaaatcgacaaactcgcgctcagtctccttgccgatccttcctcggtaaaatggaagcagtttctttcccgggttcgccgttaggtcgtcctcggacccggtcaactcgtccagccattcgtgtcgactgacggtcttgaaacaaagtccgacgcgttccagacccccgagaactaccgtctcgaacgtggcaccggcgttcgggttcaagatgtggtagacggcgcaatccgaccgttctgcacaagggcgagtgacgatctcgatgatggccttggaagccaagtcgacggggagccaagagagcttttcctcgagccgcggcatgctaccgattcgttgtcccgacttgatcatcaacggccaggcttcagtcgtattccacaccccgctattcatgcgagatgaaaatcacgtcagattggcgaagacgatctgaccggatgtctcgcgtgactcacttttgactgtccccgaccaactgaccgatcctcatcaccccaaccttggcgcctttctgctcggcgaccctctccatgatcttctcgacgacccacttgctctgcccataccccatcccaccggccgtcacgggatcccgagagaacgtctcctcgacggggaccccggggggaccgttctgactcgtccccacgctcgagctaaagtagaaccgagcgtcatgcgcagccttctgggtcaagttcaagaggttcatcgcacccctgatgtgtggttggaacgagcccaacgagaggttgaaattgacgggccagtggttgcagatcaccccggtgacctcggctgacaggtcgtcataatcggtctgggcgagtccgaatcggtcggcattgatatcggcggcgagggagacgatcttggcaaaagaggtctcgggcagtgtcacctttctcttttcgagcgattcccggacgcgcaagagagactcggcgtgtgaggtggctcgggaaaggcagatcaccttggagaccatggcgaggtcgaccagttgacccaacagatgagctccgagcgaacccgtagcgccggtcaaaagctgcaggtcacgggtgagtttcatgatcgccaaaagcaagacgaaaagcaagcggactcacgatgacttctccatggggttctgtctggccagctcggcgctcgactacttctcggctgagcgtatcgaccaagtccaccatctgctttgccaccccgatttcctcccgttcggcacccccgctcagactcaagacatggcgggccaagagcctaacgctcgggtgctcatagacaatgttctgaccgagcgccttgctgttatcttccagcccgaggtcgagcgacttgatgatcgagttgcgtaccctcgtggcctgcaacgagtcgatcccaaaggcgaacaagtcggtcgtaggttccaggttctcggcgtctttgccccagacctcgaggatggctttggtgatgaacgtctccatctcggcatccaaagtgatccgcctcttgacgaccccggaacccgtctcgtaacgtcgataaacctcgtcgatcaggtcggcaaactttttgtaacacgccggtcgcaagatggacaatttggtcgccacggggatttcggtcccgatcggtaagatctcgatcatctcacggacgagccgactatgactcggggcctcggaattggcctgttcgatgacgggccagatggcgtccaggtaagcctgcttgtcggtcgccaaatcgatcgcttgttcggaaggcaggatcaacgcgcccgtttgcggcctcgagtctccaaacacgatacactcttggaccaacggcgaattgccccggatggccaactcgatcgggaccgggttggtcttttcccccaaggtctgagtcaacgtatcgtccagccttccgacgtacttgaaccagtcctcgtggtccgagtgttgaagaaacaggtccttggtcgcgtagctattgtccgggcgattcgacatgatcttggctggccagccatcggcgacaacgagctcgaacgtgttggctccctgaggttccatacggagaaactcggtgatgggaccctgggcacgtaaccaattccaacccttgtcattcgggtagtctcgtcgcgagtttagcagagcacccgtctctatcgcggggaattcgaaatttcagcatgtcacgccacgatgccaccacgccgactcgggtactcaccggtagtcccgtagacggaaaacaagttgacccccgcttgaaccaaccgatcccccagatcgtccggtaccgccgccccggcgaaactgaccgcctcgaaccctgcaagacaacgtgtgccttcctcggtctctgccaacatcttgagcacgtacgggacggcgaaatgttgttccggccgggttggggaagaggcgatgatgcggacgatgttggaggaggtgagcgggatgtgaggcgggaagagggtgaacgtcttgccgtggtagtaacatcgaaaactgcgacgagatcctcgggggtcagcatcatcggtatggaccggccaggtcaagcgcaaaagactcgcatgctgaaatgaccaaacccatggaacagcggtagagcgctgaatccggtcttgggcagggacgaggcacactagggacgaggattcgagagggcctcgcgtgaacttcactggttggacgtccgccgtatgaggataccccgacgagacaagctcgactcacgttggcgatcaacccgtagtgagtgatatacaccggtttaggaaacccggtctatccaccgacagcgtgaaaacccatctcagcgccccgtcgactcttctcgccccttgcctggtttcaccgcggggaaaccgggaccactcaccgacccggaagaatgcaggatcacgcaactccgccgactctcctcttcgggcgtaaggacggggtcgaacttgaccacgacggtctcctcgatcccgcctttaccccagatggggaacctcttctcggggagcacgtccacgtcgtacctttccccatgcaagacccgtttcacctcctcggcggtcgaacggaatttagaaccgtagatgaggtgggaagcggtcgtctgtttgacgaggtgggcgatcgccgcaggagagttgttcacgctcaacaggagcgcggtgaggccgagtttggcgagggcgatctccaagatggattcgtcgatcgccgtcgaagtaaggacggcgatgactcgttcggaagggaggtcggtcgagggcttggtcgaagcgtcaggacggaggtgggcatagtgatgacacagtctgtcgacacatcgggcgagctgggagtatctgcagggaaaggacgaacgagattagcgcgcaacggggatggatgatgcttcgaggtcgctcacgtcaaggtttgtaattcttgcccaaactctgcggctcccgtatgtacagcccagtcatccggcttatcgcctatgtacacagaggtagtagtagcagatgatcagtctgtcgtcgttgcgcagtcgccagtgctcaaagtagacggtgagtaaggctcacgagcgcggatatcgactagttcagtcagggaacgggctttgaacgtgggtgcgggcatgatatttgatggatcgtgttacttgtgatcatcagagggcagactgtatagatgtgagtggtctgtgattggtgtgaccggtgtgactacgatgaatgtgtgaatctatatacggaccatcatgtatctccaagtgctcagggttgaacgtccgaccttgaccccggtccggggcaataatcctccggggaccgggggaacccacatcgactgacatttataaaaaagttggtaaccatccatcgtcatgtcatccatcgtcacatcatccttcatcatatcatcatgtagagaaggaagaagtagtacgttcacctcgtcctcgctatatcagcaaaccaacgtgcaacgtgaaccgacagggagagcgcgagcacgagcggacgagacatcggggaaagatcgacagcaaaacgtattctatgtaatcagggaccacgacatcgacgacaacgaccacccgtgacgagtctagaccgacccaggtcgcatcaacttctcgaccacgtaaagtcgataactcccttcctccccaccctccttgacgtcctctttcccaataacacgtcccttcaactctttcggcagtaccctcgggaccgccccgacctttttcctaatgacctcttcgtggcccgcgacaatctcatccaacgcgtcccggacgtcgccgacaaactcgtagtaaatctcgacctcgtccgcaggttgcaaaccagacgcctttcggagctgttgacaccgcgtcgtcaagtcacgtcgtaccaagtgttcctcgagttcggcgtgtttccgtacgtccaaaaggacgacgacgtcattgtccgtgttcgtgtcccaatcctcgcccgtcaactcgacgtatcgcgtgacgaccaagtcgcccttgatcaacttgatcccgtccacctcgatttcgtccgaagaagcgtacgccttgacctcgtcagaagtcaacttgggaagcccgttcttgacacggccgagatccttgcgcagctttttacccaacgtcggccaatcggcagtcgccttgtacttgatgcccactttctcctcgtccgaggtcaaggtcacgctgaacacgttcagctcttcttgaatatatcgctcaagcgacttgacgtcgtcgaggtattcggcgtcgtggtggaagacgatgatctccttcaagggctgcggcggaggtggtttttttttagcaaacggtacccagtatcgcccttccaccccccgcactcacctgcttggtggccagctttttcctgtctcgcaacaacctcgtcaaatcgatgacggtctgcatcctcttgacctgcctctcgacgacctcgtcaaagtactcttccctgacctcggggaacatgcggaagtgcaccgatcgaacgtcctcgctatcgtccttggggggcgaggtaaagggcaagagcgcatggtacaggttctctgaggtgaacggcgtgaacgggcacagggcgagcgagagcgtgtaaagcgtctcgaacaacgtgttcaacgccgccaccgtgtcctcgcgaccgctctctcccttgagtcgattacggttgaatcgaatgtaccagttggtcagctcggcgatcaggtcgagcaatcggggcacgaccgtgtagagtcggtaggctgcgagccaaggggaactttttagcacgatacgctacgctgcccgaacgacggggccacgtcgacccaccttccatttcctgcttgacgtgcttgatcaacgactggcacctggccaagatccacctgtccatgacgttttccgacttggtggcgttggggttgtacacaaacttttcgccatgggttcgctcgtacagctcggcctgaccgatgaagaatcgcaaactgttgatccatcgtccaatgaccgtgtttcggacgtctcggacaccgtggtcttggaagatcaagttgtctccccggacgacgggagagttgacgaggtagagcctgcacggaatcgttgcataccgagtcagtcgctgtcgtaaatgcaacagtaaacgaaacgacaaagcgactcacctcagggcatcggaaccgtattgatgcagaatctcctcggggtcggggtaatttcgcagactcttgctcatcttctttccatcgcttcccaacaccaatccagagacgatcaagtttttccaaggagccgtgtcgaacaggtgggtaccgaggacgatgagggtgtagaaccaccctcgggtctggtcgataccctcggcgacgaaatcggcagggaaggctcgctggaacttctcttccgaggtgctaaaggggtagtgctgctgcgcgtaaggcatgctatcaacgccaaccggcaagaggtcagcgggggtcgtccaagggctcgagcatgagaccggctgtgcgcgcaccttcccgactcgaaccaacagtcaaacacctcgtcgacacgcttcagatcgcccttgccctgcttggaagggatggtgatgtgatcaatgttctccctgtggagatccttgatcccggtgactccggacagcttttctagctcttcgaccgagttgatgcagacgatctggaggtgcaaagcggaggtcagcagtggcgcatgttgacctgtcccgcaacacgctcgacacgcacctcttcataatccgagctggtccacagggggatgggagtaccccagtatcgatttcgcgagacgttccaatccctagcgttcctcaaccatccaccgaatcgtccatcccgaacgttctcagggaccctatagtagcgtgcgacgatcagtcacgtcattccccccgtagcaaaaaatcggctcgctcaccatcgggtcttttcgttgttggcgaccagcttgtccttgatctcctcgaccttgacgaaccagacggggatggcccggtagatcaaaggggtgttggatcgccaacagaaggggtaagagtgtcgcagggtgctctgaacgatcaatcgaccggcggccgtcaagtacttcatgatgggcttgtcggcggcctgtgcgacgggaattgagacgaaggggtacaagcatcagcctttcgatgtcaccacagggtcgaaccggacggaaccgaacactcaccttgacatgcatgccctcgaaatcgggaacctctttggtgaacctgccggcgtcgtcgatcgggcaaggcggcatctcatccttggcgacaataccgttggcgatggcgacccggtgatcgtcttcaccgaacgcgggtgcctggtggacgatacccgtacccgccgttgcctcgacgtagctatcacatacgacacggtaggcccggtcttcaaactaccggtggaggcaaaacagtcagccgggatattctcggagacggggagattgcccgacccgaactgacctgctcgctaaaatactcgaacaaggggacgtatctccatcccttcaaatccgaccccttgaacttgccgacgaccttgtacttgggctttttcgggtcctgctttttgccacctgccaactctttgaacaaggtcccgatgagggattcgaggaggatgaaattccgttcgcgcgtcaaatcataaaccttgacgtattcgaaatccgggttgacacagagggacaggttggaagggagcgtccagggggtcgtcgtccacgccaagaacgacgtctcgggttcgtcgacgagttggaacgccacggtgaccgcgggatcatcgacgtccttgtaattatcgctcgcctcgaaattgctcaacggcgtcgtacacccggtagagtagggcatgacgcgtaacccccggtagaccatgtcctttttccacaactggccaaacacccaccagacgctctccatgaacgtcgggtccatcgtcttgtacccattgtcgaaatcgatccatcgacccatcttttcgacgatcgattgccactcgcccgcatacttgagtacgatctcccggcacgcggcgttgtacttgtcgatcccgagatccatgacgtcctgcttggacgtgatgcccaggttcttgtcgatctggtgttcgacgggaagaccgtgcgtgtcccatccgaaccgtcgttccacgtggaacccgttcgaataagcgtatcgcgtgaccatgtcctgtggaaacgtcccgtcgtcgaaaggggagggtcagctcgagctcgaggtcgagatctgtttacacggagcacttttgcaaaggcggacggaccttgatggtacccaacaacaagtgcccgtaatgaggtaatccggtagcgaaaggaggtccatcgtaaaacctgtactctcccttgccttgacccttttcgagacgttcgcgggagagcttttgacccgtctggaaagcgtcgatcttgcgccagtattcgaggatcttttggtcgtccgcggggaaggctaccggtttgacggctgcggggcggggcaggggcagggcagtccaaggggatcatggcggatgcgtgttcagttgtgcttctatgtgtaaaaggtgggacggtgtgtgtggactggggttgatggctcaccgtcatatgccaagtgttgatcggccgacatgattggatttgtttgtcacccttgtgctccccttgattcgagtgcgggttgttgaacgatcctggttttcctttttttaccggtccagctacgtttgaaccgggaaatgatgacagggtatgtacctttgtagggtcaggacgagtcaagatgtctatcaaaggagactttccaatatgccaggtgcaagatgactcgtagctagctcgtaccaagtaggtcaaggtccaagggacgttagttgtagggaaaagcgcggagagggcaagccaaagagccaaggggagatgtgagatgtgcaccgcggatacacaaccacctagacaggtaatgtacgtacacacacactactatagtgtaactgcttgccatacctattctcgccaaggtatcgcatcgcatacatgtatcctcatctgtgtgaatggaaaatacccaggtcgatcgatcgatcccgatatcgccctatgaagtaccataggcatcgcccgcgaaatcgcgcgtacccgctcgaccttctacgacgaccatgacgactctacgcgctcccacatctcaaacctatacctgacacccttttcctcgacctcgccctcttgtacctcgaacccgacaaacgtttgcaactcggcatggggacgtcgtacccatacccgatcttgagtgaaatcgacgagagacacgtcacactcgtcgaaagagggagagacgatccgggtgagaaggacccggtcgacgaggttttgctcgagagcgagggtgtacagttgagcgcccccgatgaggaaggtggtcgatgtcaacgtcgatgatgttgtcgaggttgttgtcgccggagagaccgagctcatagcttcttccaacgatccacacgtcatcgtcccttcacaccccgtcctaccatcccattcccatccaggatcacacaacccaacccgacccgaaagcaatcagccgtcccgcacgagatagctatacaaagtcggttgatactcacacatcgatcgaacccggatctcgactgacgatcacgttcgtacgaccttttaacggtcggaatttggaggggatggattcccacgtcttgcggcccatgatcacgctgttcgacgacgacaacggcagcgaggtggggttggttgtggagctggaggtggaggctccggtagtggctatgatatgttcaagacaagcaggatgaaagcggggaccgggttaaaaggaatgatcaactgatcatcagccccgatcctcaacattgaccgtcctccccctaacacccgctagcgatacgcaccccgagcgaaatatttcatctccccaggtaacttccaaggtaatcctcccttgagcccgattcccatagactgcgttgcagcgacgatcatggtcatcttgctcggactggcgtgggacatgtttgtcgagcttcggtgggggtcggtccgtcggtggtcgtctatgtgcgtgtttagagagagtgaaaggggcagggagcaggggctaggtcaaggtcaaggtccggagaagagatggacacgttccgagagagcgggaggtctagcgggtcgatatagcaagtccggtcgggataggtatagaactggacgacaccaaaagtgctcgatcgacatttccaactctccagagctcggggatcacgcgcgcgcgggcgagaaagagagaggatcttggggaaattcaggaacccgggcgatcaaccctagactgcgcgattgctagatttgacggtcgacgtaaacccccgtacaaaagcaactttctaccaaggtagtatggggtagagttcgtcttgcaaggtagtgtggggtagagttcgtcttggttttgccgatcaaccttgagaacctcacagagctcagcgggctgcatacgagtcgtgatcgaatcatattatgacgagacaggcagaccactgtcggttacgagctacaaggagctatcgcgatcatgactaccagcaaacaggcgactggggagattatgctgtcatgaagagaatcatcattatggaaggaacccgtcacaacggattacgggagagaaaaatgtccatgccgactcgaccagccttaacacctccagctaccgtcccggttgccaggccccgaaacgtaatagtatggccattcgccctcggacccgagacaggtatcgatagagaccttttgaaggccaccggtgacggccagagcgtgtggggtaacatcgtacacggctgcaatcaggtcgagcgcggtccagctggtcagcctctttggcgaaaacgcgagatgcccgcagcgcagcaaagctcaagaggagtagcacttcaaggggaactcactgctggcgatgacattgtggttgaggacgatcttgccactctgccctttgatattgtcgtaagtctgcttggactgccagacctgtgcgcctgtcgatgcgacgatagtcacggcgtcagctttgccagctacttcgaggtccagaaagcacatcgatcgaacgtcgacgacgataataactcaccactagcatcccgagtgtcgtcactccacaggatcatcttggtgtacccacgctgagcggcgacctgcaagacctgatcgttgtattttccatagggaggtcggaagtatttgggcttcagaccgaggatcttagtcatggcttcctcgaccctccagaactcgtcgtgcctgcaagaaaattgcaccgacccgtctagttgcgcgaacctgcaaggcaggtcgacaaggaggaagctcacaattggtcccagttcaacgtggtaaggtccttgtgcgaccaggtgtgggagccgatcgtgtgtccagcgttggacatgcgtttactataccgagtcacccggcacggatcaggtttcagcagtcgcccttcgtaacattccccctctcggctgcgatctcatcgactcacaggacatcagcgtaatcgtaaatacatccatagttccgcccgttaacgaagaaagtggccttgttattaccgagcgtgttgacgaggtcgttgtcgtactggaatgggccgtcgtcgtaggtgatggcgatttgaccctggtttttgcaattgcggacgataccgacggcgcgcttggacagggcagcgggggcggcgaggctggttgtggaaagagccaggagggagattagggcgatgagcgaggagaacatggtagagattctagctaggtcgattgtatgcgaaggtgcgaggcagtttctcgataaattatacaggtcgaggacgtcagtgccggtgagtcgaggatcaacccggcgagcagaacgaggatgaccttgagacaacctgatatatacttggccagatgatattcatccacatgatccccggtccatcaatggatcatactatgacgaggctgtgaaagaagcaggatccaaggcgcccaggattcaatgctcgggaacgacctcgctcggctctactacgagcgaatgacctcggttgacatggtggcttggtcccgtctcgggttcgtcagtgtccgagggtatcggatggaattccagtcggcgttgccgccgaagacccatcgtacggcgggcgcaagtctctgaatacgtagatctcctggagattcccgctctttgtcccttgcacagccctcctgttgaaacccagcggaagcttaaaatcgacctcggttcaatcgcgtaccgtcggctgctaccgggtagttggcgtgcgatggagaggtcaagatcaggctagcttgaatgcttagcatgtcccaattcgcaagcgccgataccgtgtgatgaggttggaggcgttcacagaccaagtcgacatctgctgctatgcattttgcatgtgaccgatcgggccgagacaaggtcaatccgctcgtttcaaccgaaaagcttagcgccggacccggtcggaccgatggatatgcgcttcgttgcacagctttcaaggtatgcggtgcacaacgaccccatgtccctgggcctcgagatgattcagccgtatccaccaccgagaggatagaagaatctgcgggcatcgtcaggtcaatccccttcccaagcaaccacgagtccctcttgtgctgccaagtccctctcgactctgtctgcttccgtcggagccgaccgacgtcgacccaccgagaccttcggacccagttccacgggcgagagaaggctgctagcgtcgggtcatggtcatgtggccaagagacgcaaagaatcaaggttctgggctcgagaaggtccatacgtggagcaggaaatgtgacggggtctggcgccagcttggagatgacgcccggcgacttgacaccgcagtgaccccgtttcagtccgaaaaagctcatgctcaaccggtcgtccataatcataatgtgtgacccggtgcggtgattaccgccaagatgatgggcggatgatcaacgtttctttctaacgctcacgtgatatcggtggaagacgggtagatgtgtaggtgatcattctcagacgctgcgtgacccgtcattgccacgatgatatctcctcgcacgagatcctgcagcgcttgattcctcacacagagtcgctcggccacataacattgagtatccttttgattaggacgttccacagatcgaacatatgtgaccatgggacgtaatgtgctcgtcgaatcagtcgtcgaatcgagccgacttgactagaatcgagatgcaatcgaaccgacgtgccaacaaacacgcatgatggacacgaagtagagttgatggctcgtctctcgtgtcgtcatacaatgggaaaactcggatccggccccgatcaccgcctcaaccccggctgcgagtgactatgcgctactctatcgattcaagatcatacacatgtgcaagtattcgattcgttcccaggtcatgcgcgacgcgtcctatcctcgtgtctagcggtagtagtaggtgatagccagaccaggatcagttctgagtcgtcaacggtctaaatatctctgctcactagatctccacccattcttccatgcgagagatcttgttatcgtttcgataccctgctactctccagtggtctaagcctcgacagtctcgcgacgttcaatgaagcgcgcagtcggcgatcggacggtcatcggcggaattccgggccagagcgaggtgatatcatgttcatcatcgcccgactggcgatccctcctattcgacgtcttgacgtttgtgtcgaagcttgttcttcttcttatagcttgagagaagtgaagtcataccgtaataagaagcgtggtagtacgagtacattcaatcatgccgagcaacgccggcggaaccgaatcaggcggagcaccgtcaaggcacgaccgcaagtggtggaagtaagcccagcccggtcgaacagctgcaaggcagctcgatacacaagtacatcaagcacaacgagctgaccggtgctcttttgggatttcagggaggcagttttctatcaggtctatccggcatccttcaaggagtctccacctccgggttctgaccccgacaaatacgactacaagggggtcggcaacctgaatggcatcatagcttctttggattaccttcagcacgatctgggggttgatgccatatgggtgtctccgcattatgaaagcccggagcgagatatggttagaacgggaatggtacctggaacatctgggctgtcaaggctgatattccttcaaacggctgcagggatacgacatctcaaactatcaaagcatcaacagcaagtatgggacgttggacgactgcgaccgcctcattaaagagactcatgccaggggtatgaagatcgtctttgacctagtcgtcaatcagtgcgtgcttccaaaccacgcgctgttatcatagatatcgactgacattccgtcgggcgacctgaagttgctctacagaccatcgttggtttcaagaagcgcggtcatccaagtcccatccgaagagagactacttcatgtggcgtcctgccaagggctttgatgaaggtggtcaaccgattccaccctgcaattgggctgcggcgttcggcggtagcgtttgggaatgggacgaagctacccaagagttctacctccattactttgacaagacacaagcggatttcgtaggtttcgatcgatccgcaattagatcccttatcaagcctaactaaacttgaaaggcaattgtgcgatacagaactgggaaaacccagaatgtcgcagggcgatatacgatgaagcgattcggttctggctcgacagggggatcgatgggttccgcatcgacaccgtcacgtaggtgttctcacgaggggtcgacatctcaagctctgattcaaccgctacttcaattcagactctactcgaaacacttggacttcccggacgtacccgtgcgggacccatcaacgcgctggcaacgtccagacaacatggtgtcgagcggaccgaggctgctcgaattcatttcagagatggtcgatgaaagcatgagcagctacggtgatatcgtcaccatcggagaagccgccgtagcggctggagatgggttgaaggaattgatatctgcccaaggtgagcgcacgacgagccctggtcggcatcggccattcaggcggatctctactcattctgattctgattgcaatatcagcgaagcgcctgtcgatgttgtttctattcgatgtaagctgacgtcagagctgaatccatgccgtcttgctcacattgtcatcgctcctttctacctcgaccgattcctagataactctccttgatgcgggtcgagagcaagcccatttcgcacgagcttggactttatccgaatggaaaagacacgtcatgtcttttcaaaaagtcatggatgggactgattgctggaacaccaactatctcagcaacgtgagtagaaggcggtcgctctcgagggtccaacatgctgaacttgcgctggacttttcatgtcagcacgaccgtgcgagaagcatcactcgatacgcctctgatgctccagaacatcggatcgcctctgggaaactcttagccatttatcttttgacccaatcgggtacgcctttcatttatcaaggagaagagattgggacgatcaatgcgcccctatcttaccccatcgaggactataaggatacagagagcatcaactggtgggcctggatcaacgagacctataaggacgacccggctaccattcaacgagcgagggagggccttcagttgacagctcgggatcatgctcggatgccgatgcagtggacggacgggccgaatggaggattcacgggacctgatgcagcgccatggcaaaagatgaacccatcctacgacacaatcaacgtgcaaagtcaactggatgatccggacagcgtcctttcatttcacaagaggttactctcgatccgcaaacggtatcccgaattgtttgcctacggtaccttcgagatgctggacccagagaatgatgacacgatgatgtggatcaagggcacagaagagggggacgagcgacaagcgctagttgtacttaactttactggaggggagatagagtttgaggtgccgacaacggtcctgaagggcgaagtcaagcttgtcttgtccagtcatgcagatgggcgtgagaccgtgcttcagccttatgaaggcagattgtacttttgcaatgtatcctgatgcgcaaaggatgtaatgctgatgaaaaccgggtcccgtatcacgcgaggatgagcatcaggccgggctctcacgatatgttcgccgagcgttagctccgtcgcgccgacgggcctaaggtaaaatcggacttggtgctccgtcgtttcatagtcaacatacgataatgacgactatatagcctccctgatcgtgagctgcagtcattgtcagaatgatcatgtgctgcaagagatcttactcaaactcattgtcgtaaatccaaatcatcatccatatcattgccgatgtcgaacaatctctatcaaagctcgcgtgagtaatccgagggaacttcaggaatccctctgcgtgtcaggaaggctgacagggtgcgacttcgttggtatcgcttgggcattccagaagcgaagggaaatatgcccgtaccaatttatgaacaggggaccccttacccggaatgcaatcaggcgagtttcggaaaagggtttcacacatccgacaccagagtctgaccgactgatcgttcagcagaatcgagcaatggcctacgatcattctgctggccctggaaaccaagaacaacaattctactcggcacccatgtacgaccaggagaaaatccaacaggtgccctttcgtcgacgaatctcgaagaaatgttggtggttcatgggaatcgctggagtgattgtgcttgcagcagtcgttgctatcgctgtcgctctgggtctcagagagaacaacgacgagtggaagaagaacaacccatgagcatcgacttgggggctgagaaggtttgcttgtaatatatatatatacccggtttcgttatcaaacgctcgaatgacgtcgcgaacgcaaatattattcaacgcccgttcgagtgcagcttgggatcgccgcgagctttagcctcgcaaggattgcaaactggcagtttgtctttcagggtggtaacgtggagtagaccaaaaacaggtaggatataaacatggtttctacgaggatacagtgtttaagcgagcgggacagacattagacgcgtctgccagtggatacaagggttacacagggtattatagtgtcgcatatattcggttccttttagtcggggtaggcttggtcgtacgcattgaggcggggtctagatggagtccgggcgactacgatccaagcgtggatgactcccggtacccaagcgcaaaggcaaaggaagacattcaggagaacttctgccgtccagcctcgtttcatagcaacgacgagtggtgggatgatgatcgctgtcgaggtcgtcgatcagcttgagcgtgatacccgttcgtgcggtgagacagcttaccttccacatataacaatgcatcatcgaagctggtaccctgggatttcgacattgaggtcactgctgtgttttctcgcgtggtattgaaggtagtcacgggttacagcaatcgcagagagcacctgatggatcccccgaaacgataaagacatgtggccatcagcttttatatacagcgaaactgggcgggcgtctacgtcctctaagcgcctaattatagcttgtcgatttttatctccgtcgggccgacgggcctgattgaaccgccgtcgcccgcgctgctatcgacctacgtccgcgactgcggcccgatcgattgaccagtccaaaaggtcggcgcttccaaaatacccgacccgaatagagtcatccagtcttcgggtatgtcatcgagacaaagtggattatcaatcacctgcgcgtcccgttcaaagtctgcagaggggtattgattgatcacaggcagttgcgcggggctcgcagagtcacgtttctcgatagcgttggctatatcgtgcaggggactctcgatacgtctaatgataacggatgcggcttgatgcgacgaggtcaggacatgtcggctgtgtttgacttcggtccaggtcagactgccgggattatcctgacccggctcgaggcgatgaaggatccgcacttgagagatggtggcaaaggcgaggaaagcgacactaaggatacgcgaaggcaattgcgataggtcgggtcggtcttgggccaatatggaaacgatgcagcaggctcgcctgtaaagcagtttcgctaccctgagttctgagaggccaaatttttcgggagcgtctgctaaggatatcgtctctagatcccagttgaccttttgaaagatgatggcatcggaacaaagcagatcgagcttcaaatatcttgaagatgcgactgagtgagaacggactaggtcagcaatcaatatttgacatgtaggtgcatatgcaccgcacgcactttgaggcagggtatcgtcgtcgcggtatccaccagtcagcgtttccatttgctcacacaccatgtcgattgccttgcggtccagagtgatactctgccgtagagcgcgatagtggaccgacttggtctggatgtcgcgcagtgtagctgcttgtacgagtaggtgtatcaaccatggtgattgtagcctctctgcatcacgccatgatatgacggtagagagatcaggatactcggctgcaaccacagacaagctaggcgttgtatcaaacatggatctgaaatacctcgttgccaatcagccaggatggtctcgaacggcaaccatacacgtctttggtacgtactgtctatgccgatggatcacgctgtataactgtcggatttccttgccgaacgatcaatttcgctctagaaatagttcttatagatgacttacgagacaaagctgtatcaaccgatccggccggtcaaagaacgaagtcgtagtctgtcgatccgctcgatgatcttgcaagatctgatccatccctagactcttgatcgtgttccaggccagcaccgaggcgttgtatgggtccatgactcgaaggaacctggatccgggctgggcgggtgccatggatagtacgagaagggcaagcacagtgtccttgtccgggggaaaggaggacaggtctaggattgctcggtcggtcgcctcgaatatggtcttgcgttgtaggtcatctgaaatgacttgaggtgagcgtgagcaggcaacgaaatagagcattgaggtcttgaggaagatcgagacgggtcgatccgattgtgctttctgaaatcgaggaatgggaacgatgcgatagaatgcctgagcaaagctgcaagtaatacctgatgagccatgtagcggaaatgaaacgtcctaggtgctgcactcactggtccaatgcaccctcgacaatgtccctagagaatggtgtgcgggtcgtgaagtccgtcaccccgacatcatccgagccctggcaatgccaatgtaatagagctgctggatccgtgtgagacggaatggcctgagaagaagcgttcggagcaggagagtcctgatcttcgaaaggagcggcgtccacggattgttgcagctcctgctgcgctggagcgatagcagaaggtgttgctgcggcccatcttgatggaccgggttgagatgactggaccggtacagacaaggccgccataaccgactgactcaagacttcgatccgagcggtataatctctgatctcggcgatagcagccatgatctgatctcggtccaagagtgcgattggaccatgacctggggaagttgcgatgtccacagaaggtctcggctggcttggagagctaacgctacctcgactcgggattccattagcgaaagggtcgtgagcaggtccagagaaagagcctcgaggtgtatattcggtctcactcccactccctatccgggtgagggaacacggtgtcctgagcactgaacaccgatgacatcctgccgcagtgaccagttcacatctcgatttgcggactttgcaagcttcgcaagctaccgagtgtcgtatccgtcttcgtttcgtcacaggttgaccgtcgagctgcatcggagtggctagtagtagtgcttagatgcgactgatagcccttgggcatgatatcgtagttgttcgttaacttgacatgatcgtgtacccttgtagcttgtagttcacgttcaggcttcgtcgctggccgcagcgcgattatttcgcaaagatgttgacggaggtcgaccaaatatggacaacgatatcttgacgatgagaccgtgtgaccagatggcgagaaccagtatacaaggtggaccacaaagcgggcaaggaacccggtagccacgctctggaccgactttgtagctgggcaaacgatcaaacgataatgctacatttattgcgattcacgcttctctttcgacgacatgtcatggccgaccccttctgcccacactttcgtccaccttgtcggtccaaggctgatcaagccagttgaatcaccttgccatcgtcagcaatgaccttgtatcgtactgaaaaggagtcaagacagaataagcgcacgggcgatcaataccagcgtaatctcgagacgcaccgatttggaactcggagttctcggtcggtcggatcgaggtaaagtagaccgtggcttgctctgtcatagcaatagtggtggataacgtcagtacgatctgcgaacaaaggcaccgagacatggaatgcctcacccttggaaccttcaatcctgaacttgaggtccacctttccctgccgcagattgacggtacccgaaatccaaggctcaccgaaccctgagtcaagatcatgattgaaaagatcagatcatggctcaatgggctgacatattcagggcggtttttacttaccgtaccagttcttggcgtagtgtacccgatctccaaggagctgcttgatctcgtccgagtttcgcaattggtaggtgatctgacggaggaccgacgaggaaagccgttctgcacagatcggagttgtcagcggttgcaaaatcgaagggaatgtccagataggtactaaccagcattggtagcgtgcaagaggaaagcagcccatgctcctagtcctagtgttgcgagagccgtgtctagaagacaagagatcgggctccaaataagctttactcggtcgcgactcgcatttctgttacttacacatcacccaatttgactgcggacaacaatagggcaaatcagtcactactctacaaaatgacaagagctaaaggtcactcgatgactgaccttgagctgaggcaacggtctggcttcctttggtcgatcgtagaccatcctgggtcgactgggaccggcaaaagattcctcctgcttgacgccatcgacgtatcgaggtgctggagcagaaacagcacctgaacgattcgcagccatatattccctcccagtctcgggtgcttcgtatttcggtgcagacggtcgattggctttcgaggaaaaggtgatgccctcgggttcggtcgatgcgaatcgacgctgcgaagtggccaagagctggcgtgtaggcgtccggagattggttcgcaacatgttcgcgggaagcctgaagctcatggtgacgagcaaagaggtgtcaagtggtgtcggtcgagactacgagtttaccggattctctgaataaaaggactcaacgttgacgatttcgtcttgatgcttcaggatcgagtgtcgggttcgaccaagacgaagcgcgggtccaaaaatcaagattcagctatgggaaacggttaggatcgatcatgacgcatgttcatgcttcaaaagggtatatctaaagacggacaaggagactctagtctataatggaatgctatgctaggaagagtttgaatcggtccgtatagatttcacggttggctctgaatggccttttgtcagacggttgtttttggccggttcaaaggccaccggggcgaaaagtcggtcatgcccgttctttcgggttagacaatacgccttgcgaacgttgaggaggtcttcacccagccatgctagggccggtttcggtcggtaccaatcgccgttgcggatcgcgtcgtatccggcagcgtaaaaggtggaagccttgatgaggaatgggtcgagggccagcatgtcgtcggcgtcaggaagagtgaaatatttcgcacggaacgtttcgagtatggcattctcttgttcttccagtagcttattgatgtttctgtggaacgtctcatcctgcctcttcgacggtgacatggtcttgccggcgactgggcggttggggccttccactgaagaacatcggatcggtcctaataagcgtcatcttctcaaagcaggctctcgaggccactcacatcgtcgttgggcttgtgcgagtagaccggcgtactcgcgtctcatcctgctaaattcttctcgatactgtttgcacgacggatcttccggcttgtacacgagatccgggtcgagctcaaactgccctcggacctcggaactgacccattcggtcgtatcgtgcgatgtcgacttgcgaggcgttgcgagaacagtccggttcaatgggagtcctgccgcaggtaccaggctacgcagttcatggaccggtccgaatggtcgacgttcccctcgccattcttccatctcggcatcggtcggcataggtggtacctcttccccagacttgttggtgtccatgaccacctcgcaacgcatgttgagatacaaagacagcctggatccggctccctcgaccgattcttcattgacagtctgccacatgttccgggttgtaccgagctcgcgattgcacagctctgtagcaatgtggcgtttcatgcaagatatcagatagtcgtccgaatagtctctgatcggaacgaatgggatcttgagtctggggggacgagggtcgggcgggaagatgtcttggttccaggaaatgaaaaattcgtctccatctagatcgccgcccgaacccctaacccctaagaaaaacaaactttttgccctcgtgtgtgatcacccgggaaagctttcgttcgacctcgccgaggctcatgggacgtttgaattggtaccacaggaaacggtctgctcggaacatgcgataagcccgacaagtctcgtcagagccagatggacggatgtccaaaccagagtcgagttgacggcatatataaggccggtacttggggtcaaagacgtaaggaggtccgtgctcgtcgattatggcgttgagaacaaggtcgtcgagggggaagccgtcgtcgcttgcaggctcagtggtggtcgggaggtccagctctcgagatccaaagagactcgcgccggattcatctctgcagaagtgttctgaggcgagtgaggcgagaaagtcagaatggcactagtagggccagtaattacagtcccgactcacttggaggcctctcgtcgagtaccgatgcactgacctttctcgtcgaaccctgagactcgaacgcgaccgaagtcgacgtgtctgttctcatccatagctttcgccgaggctgaaattcgacctctttttcttcctcttcctcttcctcgtcgtcaatcgcttcagtgtcggattcaacgtgctcgatgtgagtctctaatcgacccccacccaacgtatagtctgacgcgtcaggtcgaacgatagggtccgagtcaaccaggtccccttcgccatcctcccacttccagcctgccagacatccttgtgaacttgacaggagcatcggaatgagatgccctcgaggcctgctcgaaggctgaaatgagttgaagagcttgcctacgtccagcccgacgcaaggagcgtagacgcgtcgggaaagaggtcgaggttggatggattctatacgttccgattcatcgtagtgatccagacccaagcaatacgagacgagacgaagcgagtatcgggctatttcatggatgtggcaaattattctgtatgaggtgttataacgaaagaagagcgcagaatatgcgacgacaggagattgtagctaattattgtagagtgattgactttcggttctttcgaatatgctctagctctaggtcgcgcggcgaaagctgacctaatcctgggtcaatttagtcctccccgcctgccaaacatcgcatcgtatcggaccgcctaaacctcgaactcgtgctcgaagtcgaggacgactattccaccgttcttggcatccaacagagaagccgcggtttcctgtccaaaggcacggtgaacggtgtccttctcgaggtagtagtcacggtcggccgccgaggcaaagaggacgtgaaagaccaggtcgtgcggggtcgcaaaggccttctcaggcgaggactgagggccaccagtgagtgactatatagtgataatgttcggatcgagaaatcattcgggaccgtgatgaacgtgtatgaagaattgagatcgtgctacggttagctcgccggagtatattccggtcggcgttggacatgcatggttgacgcaccaggatgtagggcttgccgtcctccttgacacagttcttcttcaggccgaccatctccctgatcaaccgttgcttgtcctcttcagaaacgctttgcttgaatcggaaaccgactgcgagacggagtgacttgaaatgagcacaacagcaagcgtcgtggcccggagccacgggacaaacttgccgatgtgagtgacgggagccatttttgatgatcttgcgattgaaaatccgtagaagggctcgttatacaattatacagagctcgggccgtaagattagcagatacaagttcagaggtcgaggccccgatgatttcgaccatatatccgtgcctatatacccaaatgaaagatgccgcgcttccctctcataatcaacaacgccgaggtaagatccgaaatgcaatggcgtgacatcatcatagggtcgaacagttataatcgcttttacagcacggagtgggatcgtcttgatcagcagaccgacatacgcatttttttttcgctcgagggataagcccttggagccgacgttccgtttcttgaaggttaagagatgcaggtgaccaggggaaagcgcttccccgtcgaaggaacgtccagaaaacgacccggcgtcgcgcctcggacgaacttgtcaccggatacgatagcggtcaaaacgacgaagtgatgcgtaattccccgatcacgattctcaggtcagatcaggtgttctggcatatcagacccgctttcagagtctgtaccgtgcgatggactagcaacacctcatcccgattgatgaagcgctcgaaagtcgatcagtcacctcgactgggagtatcgacagaacggttgcatggcgaccatgagatcctctgtagttgattccgctcaggcgacaagggcacgtaggtgatgttcgaggatgccaactcgcatgccagaatggttgtcaacaaaagaggcgagtctaggtcggtcgatgctgactgactcggcacttgaatgtaccggtagagtctgacgagagcaacgtcgcggatggagcgatgagaacagatgatcaactagagcaaggaaaacaagatattgagcgtagcgagcgcttggtaaagctatcttgccgtcatgacagattcgacatggtcgccaggatcgaagcttgcgcttgggcgcttgcgtcatgcatgtcacctgtgatcttgcgcttcccgtgtcgatgtgagcagcatccatagaagatggaatgaagggggggcaggggtcgtccgtttgcgcatgagtgatctggtgggtctgtcaggcgaatgtaaagactgcgtcatacactgacccttttcatgggctgcttctgacataagacaggattgtttctttctttagtccttcttgttttaattatcggtggtgcgtgggttgatggccctgccgaacgaggcgcagcctcgttcctctttcggcggtggatacgtcgacgcgagaaaacccaggttgaggctggccggtgggctagtgtcgctaggtaagagtataagaggatggagcgtctattcagcatgcaagacgcgatacatgatccccggggatgcgttcgatctgtaggatatgcttccagtcgtttcaaatcgtgagaccgaggcggctgcgatgtgtagatcgactgatcactccgacttcgatctcgatccccgctctcttgatgatcgactaactgatgacttgattaggttagcttccgtgggtatcgctcggcgccacgccgtgacaaccacgatcggaagcgaatcgaccgattatgtcaacatgttcatgacgacattcacggcgtggcagggtgggaaccagcgggggagggaaatcgaaaggaaaggggagacgagccgttgttctgatgaaagggagatttgagagatggatcgatcggaaacttttgtcttgccctctgctcctgcgccttctcgtgataccgccttttgatcacaaaactagcgcgcttgtcaacgatccacttcggtaattgtcaatgggaatctacaagcaacaccccaacctgcccatcgccgtgtcaccgggtccatgttgaaataatcgcttccttcgcctcgtctcatcgtctcgctctctctctctctctctctctctctctctcatccatcagcagcggacccatcgttccaagatgtcagacgttctatacgctgcactactcggcactcggcccataagagcaaccactcacaatccccaccccgccccccgccttttatccgtagcaacctggagtatcgccattcaccaatcagccacgaatcaatcatcgccctccaatctagcccatacaagcacaaacagaccacgaacatcacacgccgtccacgagtcgacgactattcgggcgaatcgacctgatcttgtacgaccatagccaattcacataaactggtacgacaaacccaaagcacgcaagccctcgagcgatcgcttgctgttcacgacatcaccatgtccgcaacgacggcgaccaacaccaacgcccaccaggaatcctcgttcgacaccgattctcacgtcgacgagaccggtcactcttacctgcccttccatccacaggcctttggattcccctttcagttctcacattcgtctctgacacatgccgggagtatggcagcggctcaggcgagtcagctgttggcggggatgatggccaacccgatcgatctcgccatcaacgtcgggaccgggttcggcaaggctgtagcggggtcagccttgagcgggacgactgggctcgaaggcggtagtcgtcatcagcttcagcagccatatgatggcatgacccgggactgggggcacgtcgacccggccgagctctcgatcgatcggagagagtcgggggaaagcagtatgacgacgttgaactcggcaggcatggacgacgaggatgaaccgtcgtcctcgtcccgatcggtctcaccggaacttctttcgaacctggccacgggtaacgctaggagaccgagcgtcaggattgatacggacgtcatggacgtgcgggactcgccgtcgatgcggccgatggtcgaggacgagctcgtactcagtccagtaccagccaagaggacgacgaggaggaaatcgagcgccgtcgtgtcgggcagatcagagggcgatgaagacaagccgacaggcaagaacaagaagaccaaggtaagtgtcgagagtcgagatcttcagatcatccctggcggctagaatcgcgaactgacaaccaacgacatcatgacatccagcctcccacggcgaaacgaggctcaacgactagcacaacctcgaacgcgccgcctgatcatccagactctgcctttcagatcatcgaccctccccatcccttttccttcaaagacctcgggttggtcccgcccccaccgtttcatccctcggaacacgccgaacagggatcgggcgaggacgacgaggacgatgtcggcaaagttggacccgacggcgtgatcatcgtcaagggcaagaggagagagatgaacagggtcgcggcgaaacggcaccgggaaaagaacaaggacaggttgaggagcgtgagtcgtgtcgggatgagggaaacgatgcctctcacgtgctgatcgataccctccgacgtacctatttctagctcgagaagcgtaaagtatggctggatcatgcggtcgacgaatatgaaaagtcgaacaagcgactgagcgagaccttggagcgactaaagagggaaaacgcgatggtgagttgggtcactcttgcctggatcgcctgtcgacgcgggcgctgaccgtgcgtttgtgaaatatagttgaagggtgtcgaggtggctgcctgatcgtgtcggaggtgttcttggacgtttttttttttttacacgttcgtcttgcgcatcgaatgacgtgacggaatcatgtatctatgttagtacccctacttgtactcgatctgtactatacctacgtgaccagggttatatcaatatctactctagcactttcgaccaggctctgcacatatgcgctctgaccgagagaggtttggcagtgcctgtcaagccatcgtcgttctgaccctgttctgttgctgctttgcggtagctgcggtagatatcatgccgaaatgttccctcggctttccaatcgagttgaacgtggaccactctcgaatctgaacctttgagtctgggtccgacgagtgtgaaaggtagctgctgtaaaacggcccacgtcacgcgctttcgacctctattcctcgtcgttgggtctcctcccacatggacacgacagcaggtgcatcgatgacaggaaaacgagtccactccaatctctgctggcaatcgtgagtctcaaggtgagatcttgttcagacttcagactggaaagagccttcgaccctaggcattgtgatgtcaaagtagattttcactcaaccctcgacccttaaacatcacacaaacacaacaaatcgactcgagagccagggccatcctcgacaaagtagacaaggtcaagtcgaactcttgcacccccatcagcatcgtatagactcggatcttgacttgatcatcagatctccagccagataaagcactcattcaggtcgctgtcatccaaatcgagctcaataaccggactctcactcaggatggcttcgctgtcgggcgatcagtcacgccgctctcgacatccgaaatctcaatccacttctgccctttcgacgatactcgatctaccacgatcgagggagtcgattccaccggttccaggcataccctacagcctgaaaagtaccaccagcacacctcgagctgaaaggccctcgtttagagcgagcggcaggctagccacgttacccgggctggtagattcgagcgacctgtccgacggagattcatccacgaccaactcgtgcgaatcccccacgactaccagagtgtcatactctagcgtgcaaaggtctcgtacctatcattcgttagcagaccctggatcaccgacaccgactcggacccgcgtcaagactactgtcatcaacgatcatgacggcggctccagcccccttcctttgaacacaccaccggcgtctccgagtacgaagcacagtaacaaagatcggacggatggcttgaagggattggacgtgcaaaggaggtcgagcaaaagaagaactgagccaagatcacctcgaaaggatgggcttgggtcgaggaccgtcagcggaggatcaagcagagcggagaagcagaccagcttgggggacgagatcgatagctgtgtcagggtcgtaagtgccgcttgagtcgagggcacacagagcgaaggaactaaatggtcttgtggtggttaccagatcgattcgcatcggacggaacctgcgacacgtctgcgaacgctggaacagcttcagaaacggctggccggactggtgccagccaggctcccattgacggaaaggacaagatcagccgagaccaatgagatatgcgagctagagtcgtttgtggaatcacgaggcaagttcggtcgccagactatacaggctcgccgccacatgctgatgatcgagtacagtccatcggcccttgctcgacctactcttccggcacgcggccgtgcttccccacttgccgcagatgttgcctcaacgggtcaatatgctcgaggagatccagtcggtcgccagtctcctacaaggcatctgtctgttggaggggtttgtctcgctcggagatgactgcaggtcgagtctcaccgagatcagggtcctcgaggtgagtgtgctatggagctggtcgaccacagcgtaccctaacacgttgcatatccgctagattctggtggatctccttcggtttacgtacaacgatcgcctcgctcgtcacatcaccacgcccctgatcgacctcgtctattcgatcatcgcttcgccaacccgacgaaccgacaaaacgggtctgtctatcatcgagcgtttcgtcaaggtcggcgggaccgaagttttggaagaattgatgctgtccaaggagcagcttggacgtgtggcctatgatctcaccaagtacatcaccctcggtatcatcgaaagccagggcatgacaccacgtcgcaaggcatcgacagacaggtcgacgtcggaaggctctttcgaatcaatgaccacgggaaaatctgggacgtcagatcgtcggttgatgaccccggtgatggacgaatcggacggcagaagcagcagggcgtcgtcgatcgatgtagacgctacccctcgcacgccgagaaagcgggatccagtcgaacgggtcgctccggcgactacccactcgagcagcaagaccagactgctgcctaaatccgccacatcgtcggcactaagcggattctacaccccgtccgccagaggcgagaagcggcatttcaaccgaggtgtgcgggaggatgaatcgaggctaggtcgcgtactcgaggaggatatggcagggctaccaaagtcctccagcagattcaacctagggacggcattcgctggatcacctctgatcgaagactttgggagcgacctggacgagacgatgcattcgacgatccggggcaagatggatgtgtttggcctacccgagcgcaaaccttctgaacgattaccccggagtcggtcgacgatgggtcccgaaatcgtctcacgagctagtccgagcaaggtcagtctgggcaagggcttgccgtcaggatcgccagtatccagccctcgtcgcacttcggcttcgcggatcggtggacagaggtccagctcaggcgaggtcgccagcagaccaggttcgcggctcaaaaagagctcgacaatggcgtcgttccaggtcgagatgaatgattcgtagttttgcgtggtcgtgattgtggaccacatgtagcaccgacctaatgacatgcacgttgtagcataaatgatatacctgtctctcatcctatctaccttgctccctgtcgtcattaggcgaggccaaattccgggcctccgtctcgtcttcgaggcctgggtcaatacccatactctcgatgatctcaacatcttgttcatcgtcctcgccggcggggtcatcggctaccggtcgatagacctcaaaaatcccgtctccttcctccggtgcgtcgatcaaaccttccaaaatatccaacgcgagatctatggtcgtacaagatcaagagtcaaaacacaccggtagtcttcgtgtcaagctcgctcaccttgcatgttcttgagctcctcttgatcccacccttcaagttcttcgccaatgtcggcataggtgattcgaggcaatgctgtgtagaaagagtgatgtagactgccaaattcgcgagtcttgagaagctcggcaagacgttccatcaggttgacgccagttcgagtcggcgccgacggatcgtggatatcgggaccaaaagctggcggaaagacgaggtgatggagtaaagatagagcagggatcaggaggcgcaacgatctgttccccattcattttcagtggacctgatcgttggtgtaaataaaccgcaaactcactcttgggtcctctcggcgctagtggacacgccccagatccgttccgactggtcgacgaggaacgagatcaaggtcggcaccagcgagtagctgtttccaagcaatgtcagggcatcggcttcgatcgtgcacatggtcgagaaaatgcaaagcacgcggatctggacgaggttggtctgcgccagaagttcgtttcaggaagactcggcgagcctcggtaacttcacgctgcttacgatcgtttcatttgcttcggaaggtttggcctttaggtatccgcaaagcagttcgaccagcggaggtctttgcagattacgagactcgccaggtgacaagaccaagagctgacggaaaaagtcgcgatctttcggtcgataccgatcggttccatcagcgtgtcgattcatgatcctcgacggtttactatacgtacagctgctgaacgccaaagccaagtccagggcagcaagcacgaggtctagcggttggtctggtctcatgagcgactgaagaccagcaggatcagaaacgaaggtcgacagactggagtacccgcatcgttgaaggtaagcgcagccttgagcaacgcgatggtcggtcgacactcacacttcggagggcggactgagatcgatgccgagtacgcttgcaaacgcaactactgcgcgcccaatctcgacgggctctacctgcgatcgctcaggggactcggtctcgacaggatcgtcgttgcgtgccgcgggcttgctcgaccgagacgtgacaggcttcgcttcagcagtcctggcgccgacattcttgacgggttttgctgttcgatcctgcttgcagtgattggcgatggtcactagttggttaccagggatcgacctggcgatgcgctcttgcaggtcgtcaaacaaggacaggttgtgtgacatgtagacgacaagtcgcatcacggccaccatcgggagagacttcgaacatgggaattaggggccgatacggaagaacgcatctggacaagcgcttaccagattgcaacgacagagaataaccagcatgtcgacgaggctttccacgaggacggcacatgtctccttggcagataagcgattatctccgatgacgtcccacaacccagcgcaagcagtctcatagatatcttgttccgtagcaacgaggacatttgctgtctggatgttgagtagtcgctggatcgtggtgatatggggtctttcagggaccccattagtaggcacgtaaaagtgctcaaacaagacgtgtatgacctatgacaatcacgacaggttcaatcagcatgtggacgtgactcgtcgactagtgagtgctgacctcgcctcgcatgtcagcgtcattgcgctcgacttggaattgatccggttcatcaaccgtggcaggctgccgataaggtgctgggtcgagatctaaagcgaatcccccttctagaggggatagtcgcgcctcgtcacgcagatcatcgtctccaaggaccaaagaatcggattcagtgtgcacctgctttgccctcttgctgaatcgattggcaacggcctcttcgtcgaccgagaacgaatcctgtaggttcgcaaaggaaggcgaagcggcgacgggcttgccgtcgagtcgatccttgcccttgcgctgggatgttcccgtcctgcttggcgtcttgaaacgatttggatcgacgaaagcggggggaggtggaggaggcatgagttccgcttgccatttacgattggtacgtggactacgctggcttcgcccaggcgatcgagaaggggtctggaatggaaccaacgccccggcaacatgagaagagctacgagctggcgtgatccggccgaatccaggcatcgcagccggcttttgcgaagggaaaaacttgtgcgccttgttgttatgtacctaaagacaaaagaggtcagcttgtgtgattgggagaggcgaatctcgttgcactcacatcgaacgtgtgctgcgattgaacggaatccagctgtttcttgtgctcggcctgcagacgcttggcttcttcctgcgctgacaactgatactgtttgagctctgtgatagtctcttcgctttttttcgtgagctacacccgtgagacgatggacgtcttggtcagccagtcgtttgccatatcccgggcaagaatcttgacatacctcttcgagccgtttccgcacgcccacagcctcgccttgacgtttctgcgcctctcgtttgtaggccataaccttctcttccgccttcatctcggtctgctgtagagctaatcgcagcgcctcgatctcggcttgcatacgggcggcatcatcggtcgtcgtcgtcgttgccgcaggtggctgtgcgtccgtttgggggtccgtaggccgattggagttgacgacagctcggggcgcggatgttgccacgacattagtagaagagccaatgctgaccgccctttcaatggcctgcgctcgggccagagcatccgcactcatcgtccgcttccattgcgatgacggtcctgattgtgatccccggaagccctgcgagctatagatcggttccgtgagagcggcggcgtcccgccgttgaaccgaagaggtgtcaaagtttagtgacgtcgaacggccgagagctttacgttcggtcgaagatgaagctggcgaggccggtctgggtagacgagcgatgggtctcgagtcagagttccccggtgcggatcgttcttgttgctgactttggttgaccaactgatacccgccgttctcatccacgaataccccgactgacatgatatagtcatcgtcgtcatcgctggtttcttctggtatgggtgccggcttcaaggccagacgggtcggttgtgcttgggcgacttgctgaatgggaggtagttgagcggcaggtcgttgtacatgaccaggtggttgaggagccagatgagaggttgtaggacgagacaaagagtgagattgatgtgtcccgcctgaaggtccgccagaggaagctggtcagtaaggctttggtattagcggtgtagttgaatctgcggaccgacctcgtcctcttgcacgaatggcgggcctcgcaactgtgtgatgataagtcgtacccccgattcgactcgaacttgcagtcgctaccggcttgacctcgttggaaacgactttttgatgagcctgctcgaccttttcgacgctggccaagaggtcgggatgagagaacaggtcgtctcctccgaactcgtcgtcatcgtcgtcgaagtcgcctgacatggtcgatatcgagccgtgcgggctatgtcgacggcatccggggtgaaatccagtgaggatcaccaggtaatcactacggaggagttagccagagtgcatgcaggcagagcaaccacaaatgcacgtgcacaacgatagaaaagtgatttgaccacatcaccaaattatggcctgggtacgtcgatcgagctacctcgctcgcgtgcgatctcgacttttggatcgacctatagctagagagcaacttgtcaaactgctgtatatactacatacatatctcaaaccgtgaaacaagccttctcatggtcagagcagccaattgtactgcagttttatgaggccttggtacgatatgtgaaatctgtacaggaagccgccatctactgctcgtctcgtgaaccaacgagcaagattgggatatcatgtttgtatctgtccacgctttgacagtgaccatacaacaacctacctgcatctcaaacgcttggaacccgtcgatcagatgagtcgattcgcaatctaagagacgggaaatggtcgctaccgagctcttcacgtgtgtcacgcacgccgtggtgccaagcttaggagctagggtcccctgaagcggtgcacaatacgacttctagatattgaacggtatccgaccctgcttcctgaaagcaagaaagaacgataactacctgctcagagaccctacaccgcctgaacgatcctcactatgcccagccccatcacctatgtctgtctcgccatcatcgttggctcgctcggcgtggccaaagctatcgggatcaccgtgccccgtgtttgggcgccatttgacaaggaatttgccatcatcgtcggggttcaattcgtgaccttatggttcagctccaacatcgccatagctgtcaccgtacagcctgaacagcgggaaggggacgtcgatggcatcctcgatgcaaagttgctcgaatacgacactcttgagaatcagatgattatcgcgatgacgacgacttttgccgctgccatgctcatcctgggacatgtctgttgtccaggtggccactggcaagcagcatctggcgatggtgttaccatgttgctcaccggaatgatcggagaatcgctgttctttttcggtagcatcccctgtgagtctagccatcgaggccgagccggccgagcgagaagcagagctgaacctgtaattccatgttctagacttcattggagacgtagagaccaccaagaggaggaagaaagaaatcaacgagatgcttgttgcccattaccctggatgggcggccgccgatgacgggaaggacaataaggaacggaagagcaaatagagcgttaagacgtaacagcacgtcaatcgcttctgttgtccagacgaagaaggttgtacacgtaacgagttccaagatcacgaagacatgatgcaactcggcatattatcaatgaggccgcacatcggtgggcacagagcatttcgacgaagacgaccaggcgatcgatcttgtccaagactatcagggcaaccctcacaggatccagctcggcttggcgcctgttctttacgtctacttcggtcaccagtccttgccgaaccaccataagggtggacaaatcatggccagtaggttcggaaggaggtagcgcagcaaggccagcgggttgcctttgatcggcttgcctccattcgcgatgatccctacaaactggccgttccacttttcgccctcattccccatctggatcatcccttgcgcgagatcaggatatgagaacaatggtgagatggtcacgatgtcgttgttcagctcgatctcgtgagacgtgccatgtactagaccaccggcggccgcgatgacgaggggcacccatgagttctcgcgaaacagttcgatcgaacgctcgaggtcggtgtagacgtggtacagtatccagtaaaaaatcttgcgggcgacgacgttggtcttggccgtggatacgggatcgaccctgccacttgccagggagacgacagtaggaatcattcgacctgatgtcctggacgcgtcgagcgcctttataatcgctaaagcggtacgctgcgcgattgagcaaccgggctcgttgcggttctgagccacggccgatagtaccacgtcggccgtggacagacatgaaaccacgagatcctcatcgttcaggtcaccgatcaacagggtgacattggatgcctctgcgagtccaggatgcatgctctggagacgagaggcggaccgagcatacacgttgagatgcgtgcgtgaaaggttcgcgacgtaggtgacggacgatcgccgagccggtctggcccgtcgcaccgagaacggcgtatgtgcgggtacgacgttgggtcatgattgccgagacaggcgagatcgtggtgccgtctcgatcgtctttccggaaacctcttgcaagccaagactttactggttggtcctcttatacttcttgccatgacctctttgaggaatgtgagcgtgaaattcctcggccgcggacccggagcgggtgacagcaccggggcctcgggcgacaaggttcgataacgtcgtggtacgatcttgaccacgttctcgcctacccgacaaacaccgatgctaccgatgccagactctcattcggcttctcccccttgtcgccatcaactaatgcttgccgatggttgtactcatcgccgtacgtagcacgaggaggtagccggtgccaaggcggaatcagttctgggccgagggcagatatcgattcgacctaggcctagacttcaaggtatagtcgaaccgcgtactctgctcgaaccgcatactctgcttcgactcgagggacaagttgcaagttgctagcatgtaccagcgagatgtcatggagccactttggccgggactctgagcaagcttctgccaaaatgctgatcaacaagtccgtagggataggggaacgggcacggcgacggcgaccatggggggtttcttccgttgattggtcatcgcggtaatagagaaaactgcagcctttgaagataaccagcccgtatcctggtttgtaagcacgaaggtccggtttcgacgatccaaacaggatataaactgaaccggcaagtcacctttcaaatggtatctcgaatgggggttaaatcccagcaactccaaagtcaagctgaattaacatcgcgcgcgcccgttccctcttcccgctcatcaatccacctagtttcgcgacctcttccaacaatcccaaactatgaaagtctctgcttataaccccgataaggcgattggcgatctgtctggcaaagtcatcctgatcacaggaggtgcgtcaaagtcgatgcatacgacacgaaccgcggtctgatgatcggcccgtcttgcatctctctaggcaccagtggactcggaactcaaaccattctcgcgctcgcaaaacacaatcctcgacagatcgtgttcacgggccgaaatgcaggatccgctcagaaagtcatcgagcaagccggagcaaacatcacctcgttcatcgcttgcgacatgaactcgctgcaatcagtcaaagatgccgcacagacgttcaccgcacgatggggtacggccgacatcttgatcgccaacgcgggaatcaacaagaccgacgaaagcgacaaaaagctcaccaaggacgggttcgagccaatgtggggcgtaaaccatgtcgcacacgcactgctcatccggacgctgcttccggaaatggaagccaaggcaaaggcaggagcagccgtacgaatcgtgcttctctcatcgctgttgcattcgacgactccggacggcggcatcgattacagctcgactcacaaattcgtcgactatgggcgcgggcgaaccgatctgaagcgttacggccaatcgaagctcgccaacttgctctatgcacaagagctcagcaagagatacccatccatcttgaccgtctcgctccatccaggtctggtcatgaccgagatgaacaccagcgcgccatggtacgtgcggactttgatggcgatcttcgtaccgttcgatcgtctgcaaccagaccaaggagcattcactacgctatgggctgccaccgagaaccgggacacgctggtgaacggcgagtattacgagcccgtcggcgaggtcggcaagaagagcgccaacgtcacgtcggagaagagctcgaaactctgggcttggacagaggaggcgctggcaaactggctgcaatagggtcttggcgcatggatgacaatctcggggcgctgttcttgagatttcgctttcctttgtggatcgttactataatatatttatgtacacttgttcattcgccacgcccgcctttaattagagatcatgtcggtctcgattacatgcatatcggtctcgaatggatgcaagtttactcgtcgcgcgaagttctgctctgaattggggctattataatatcctccagtgaatgcagaatgtgttgccaagccatctgagggaatgtcgaagggaattcattaatgtcggccgtcctcgtccgtcccgacctcttcgcggtgtcgtcctgggtcatcgcctgatcgcctatgcagaaacggcggtggtatattgagttgaattgtgctgtttagttcgcctggtagtcatgatttcttgattcttccagcatcatgtggaacatgagctcgttccagtacgtttgtactccagcggtgcaccaatgaaggcaatcgcctgggggaactgcgtgtgacacgttcgatgaacgttattcaatcgagaactcagtttctcgacaacgctgcgttcctgaatcagtggttcttacctctgtgcgcgtccgctcgtttggcagacatcggccatacgtccatgaccctgaacggtgggttcgcttcggccgacttcggcgcgtcggacatgaagttgaaagcatccgcagctcgatttgctttccgagacgtccaaaatattccgttcatcgcttcgaaccaagcgctgcccaaccgatcgtcgttgtcagccatacggctagggttatactaacccctaagggccaggaatggagaggtcgtgagtggagacggggctcaatctactgactagttggccttgtccctggtcatatccttgcgagatcgccatccggtgtacgagttgtcggctgagcaacggcgtcataggttgaggtaagcagacccgatggcgcatgaaggaatcaattcgaggtccgttcgcatcatcaagcaccgatgcaatgctcacgctcgacgtcgttgtgacagtctacatgcccaggagccattgttcggaggacgggcgacaacgggatgggcgctctcctgagcttatcctcgattgtgtcaatcttgaaaaagcggcaagacatcagcacaccgacagcgcaaaagatgcgggaatttgtagacccaccacgttcttcaagccttcgatataatccgacgaccatagcttgtcacccagctcaaaggcgcgcaagtgagctccgacgttgacgacgatcatggtcggttcctcgaccgcacggctatcagatgacataaagtcgcccattgcagcagtttgggcaatcattgcatcataccagtccactccagccgggtagtcgacattgaagttaaagcgcttctctgcgaatgcgaaagcgcgactcatctcgtccattgttgcgaggtgatgatgtcgccaaaatttgatgagaggggtattcaggcgagcctcggtcacacccgcttcgcgcaacagctcggccgtcctaggatgagtgggagatagagtgatggttgcttcccaaatgtcgggaaagtggatctgaaccaggtcgtccgaggtcgtcataatattggccaatacttgagcttgatgttgagtgagagagtctgcagaatgcggagggtcagtcgagaaggcggaagtgtcagtcaccggcgcgaacttgcctcccacaaggctgaaaatcgaggccaaattcacagcgtggggttagcaatctctctcttcccctctcccgccaactcagaactcgatcactcacattagaccgttacgacttcgcaacaagcgtttgatgaggttgtcacggcctggtcgcaggacttgacatcgggtgcctagctcgtcatcgagcgcacgaggtagcaagtatggactagcgatcctaagggtgcgagccaaagtttcggccgcgatcgcctctttgtctgtcaatttgggatcgataggtccggctccgccgcattcgttcttgaaatttgactattgatgacaccctctgtcagattagcaaaagaagaatggacaaatttggtgcgactgaaaggcgagacttgccgaaaaattgtatctctcgaccagttcttccatgcttgtgatctctcgatctgtatgccagtctccataaacgatgtcctcgacgctacagacaggctgccagttcgaggacaatgacgagggcgctgaagtccaggagagaagacgctgtgtaatcttgtgatgccacatgctcgcaccgtctccctgatccccatcgaatgccagataaaagatgaacgagcctgtgaaaacggcggctacggccgagcctatggccaatcgagaacgcatgagtcgtggtgggatggtcgttaaagccggtttcttcgatgtcggcggtgtcgtgtaagatgatagaggaatgctaggtcgttcgtatcgagttgtatgaaaatcctatcgtcacgatgagggtgctgtgatgcagcagtgagtgatagagtagccgtattataaagattgtcgagcaagtccagcttctgcgacggggtcggtcgagacactagacgggagctattccgtcggaattcacgtaaggacaaggctagaaattgtccgaaggttaagccacccgctacccgaaaccagtcggttcgcgagtgccgagctgtgcgtgcgttagaaattaggaaagagattttctcgccacctatggaaattacagacgacactgaaggccaggactatataccgtatctgatcgtttacatttgcctaccgtgatcaagctgtcaagggacacatcatgatggcaggacggacgcaaatacatatataccatcgagccgattgagaaatggtcatccagtccctgttcgcgctcgtcgtcggcgccgtcgtgatagtccgctggagcgaaatgaaattcggttcggtggtctgagaacagtcagcaaatgtcgcagggtgctcattcccacagcatgggcaaggtaggagcgatgtcgtcacgagaatgtgcacattccccaccctctcccatcagctgatcgacagggctggtggagtggcggtcgcgggtcggtccgagatcgtcgcgggattggctgaaatattccgagcggtgacgtgccttgatcgggtacctgacgccgcgggtgaatcacctaatgatacgcgattaaactagcggcactccccctgatgcagggcctggcccaacgaccgttggtccagacgacgctcggattggtgggctcgatgccatcgccaagcacgacttgctttgtggtgtagcaggctaggcagcaaggcggtggggacaccgggggttgactggagagatcgatggagaccctgaaagctacaagaaagggatttacttgatagtgatgcgtgatacgtcatcgaacgaaatggattttagggttaggggttaggggttaggggctgactcttatacacatctgacgctgccgacgaattagacggtgtagatctcggtggtcaggtacgggtgggggaagaggaaaaggtcaggttttgatgatgacggatcaagagtgggaagagtacaagaaatcgattcaacagcggaataaccagtgagtccggcaatgtagggtcggagattccggtaagaggccgaactgacccatcacctcctccacctctgtcccggttcacgatcgactcgactcgactaggacggaagatccgcccgagattcaccattttgtgaaaaaggggaccaagaagctgtggaaaaaggcacggaggatgtcttcctcgtccaacgcttcgtcttcctcttcacggacatcgacggacgggtccccgaagaacgtcgtggggacgttgccagggtcgtccaaggcggcgacttcgagcgttacaccccgggctgtggctgtccccacgccaacgacatcgtcgacgacgggtgcgaatttgaacgtgccggattcgacctcgtcaacgacaggtacgagcccgagcggtcgaaacagaaacggtttgatctcccggatgagactcgatccgcccatcggggatcccggtcccgatccggaacgcaacctcgatcccaatcacgagatcagcggcgaagggacgcatatatcaggcctggcgatacccggcatcacgcgtccttccgtccagggagaggtcaacgacgaagtggtcgaggacgacgacatgtccgtttcggacgggatgagcgacgtctttgggagcagtctgagcgagagcgtcatcctcgaagaacccgagaacgagatggaagaggacgacgatgtcgacatggacgaggatggggaagacgacggtgacggcgatggtgacgaggacgaggacgagctcgcttcgtcctacttttcctcctcgtcgacttcctcctcgacggacatgcgacgcatcgagacgccaggggaacgccgggaacgtcatcgattagaggaagaggacgagatgcgggatcaaggcaagatcccggaatacctgcgcaaggacagtgcggtggaacagtatcgatatcaacacgtgcacgatctcgtacaggaaggcgccactacgccgagagagaggagagaggggttgagtcatgccgggttgacggaccggctgagcaagttgcagatgggcgcgagggacgaaggtcgaggcggtgaaaacggaccaagggctagcgatggtgacgaaaccccgaggcggcggacgagtccaaagggggaacatagggtattgcccatcttgtgagagggacaaacacgacaggtcgtttcttcacaatcatataggagtcggaggctgcttccatgacaacatgaaacgtttacatacacaatcgcatacatgagattttgttgccagtccacccctgcatcaccctcgtcccggcctgagggagctcggcctgggcgaagcaggttgagcgagtccgagcggtccagcaaacgggttgacaaagccgctctgagtgggcgagttgcgtcggctcgaggctgcactaccgaccaacgaagaagctcgcgagatcgagccgggcatgctagcacctcccccgccgggagtatgagactgtgcaagtctgggaccatacttggcgactttcccgatctgtagatgagggcgctcgccctgaatggggccaacgtttccctgattcatcgccgacgtcagcagtgacttttatcggtagcaacacgctatagtgacctacagcaaagtcgagcgcgctgacgacgttcggttcagcgatctccagtattctgagcattctatgcccgatccgttcgaccgtgtcgaaatcgttcttctttcgcaaccagatctgaatccgctgcaccttgggccggatggagatgaccgctccgcaaacgtcgtccccgtcgtcgagctgttctccaatcatcgcgcagacgaggttctgccagactcgatcgagtaggccaggagtgttctgcaaaaccagtgtccatcgtcctccctatcttccagcgctcgctcagcaatcatgctcatatcgattatcacggccaatgactaggctgtctgctcacctctctgttgccgggttcttcgtacatctgcaaggagtctgtcaaaaacctactgcgtccatgtcccgaagttcatactcacgggtcggatcccgtcctgaaaggtagacgcaaatcaatcaatcacagctctctaagcgccccgacctaagttcgacttactttgaacaaatgaagattacatccggagttcatttgggacggatagtttcgtttctggtcgggcgactgtccaaaagtccagccaaattcttccacctatgagcaacatgatcaggagtatggtcttgcttccgaaggctgtgaacagaccgaccgtatggaattcgcctaggatcagcaacctcgcctcgaaatgcacttcgaccttgtgtctcttctcgtccgcgttcgtccttccgagtttcatggccaaagtcgtactggtctgcgagacgaacatgtcttgattcgtgaccggtcgacctgtgtcatagtagagcgtcctgaaggcggggggctttcagcactctccagactagaaacgttatctgcgatagtacgcaccagaggtgctgcagcggatgcaatccaggtttcacaacgtgaacagcaggtatgacggatgcatctcgagtttgccctgcgtccacgcgagtcttgtcgttgctacttccccacttttcgtcttggcgcttcttctcaacgaaatcatctctccaactggatgtatatttgtcacttttcacatgctcgttgtcggtgactccggtaggcgagaccctccctgccaggtcggctcggttgacgatcttgacttgatccgggacatgtgcagatctaccactgtgcggggtgatcagaggagtcactgtagccgaggaagctgaagcactgatatgcggagatgattcatccttggtggggtcggtcgttgggatctgaattgtctgacggagtcccctaggagccggtgcgccgatggacccagtgcgtcccgtaataggtacgcttcctttggcaatcttgtcgacagcgtccaccctggtgatagctgacaaagggagtttgagcctcgtactcgggctcaccgccgtagagccggcggtgtacgggctaaggctattggtaagcttctcggcttcgtcttgagtgggccggaggggagtcgaggcgacaggcaaaagcttctcaagtacgggcttcttctgttcaaatgccttagatgttgtttccagactatgattgactgggatttgcgcgttgttgtgctgtcagcaaatataccaccatcagaactggctacatactactcacgcttgtttattggcgaccctccgttctcgacgtacaccttgcctatctgctgcaaggaaggcagtttttccaatctgtgagcgttcctgccgatgcttccaaccttgtggacgtctggaggcctagaaaggattgaagccgcggtgttctcgatgccaaaggtgtgcgaccggggagaggtcagcgggatggaagggtccttcggcgggacgggtggaggaatggacgtctgaaatgtctcgctgtcgacattggtcttgtcggggctgctgcctagtggcgtcctgtatacgagggatgaatatcagttgggtaattttcgattggttctctgcaagaatactgatggtatgtatgcacctgtctgccgaggactctgatcgctcagagctggtagccatgatcgatccgaggtctgacgtaaggtagacaccctgatgtgcccctgtctatagctatcgaattgtgaaccaggattcagtctgttgctgttatatagatactggcggaccagatatagaaaggcaaggtagggtgaatcgtgtcgattggatgtcccttttgacgaatggtcgaaactcgcaactgccctcctttcgatttcggtcaaacccgagagcggcgaggacgagctgaaacagccgttcgacacccagaactacatgatggtacatcgcttacaatcgatccaagaaattttgtctgggtctgacatgcagacagatcgtatcaaaagtatccgtggcccaagcagaaactccgactcgtgcttatacagatgagttgtcgagcgatacttgttgcctcgatctgaaacgtctcacagcagacggctcgatagcgtgactacacggaccatcgtcagtatcttcttcttcttgccgatcgatcgaatctcttccgctggactcgcctgcagctcggattgatcattcacgatacttcaccatacttgtggagttggggggccttgagccccatggtatgactgagcgttttcgaaagggatagttccgcagccgacgtgccatattcaggggcacgtcaacccggtacagacagcatttctacctacgtggaacacgaagtagctgtatggcgaattcttattgggaagaccgacaaaacggtggacaaaagatgggtccagatgtgagcttgcataccatatgtctacaggcgtatcttcgatggtcacgtagaagcgcgtcccttaagcgcgagactcaccgtaacccatcgatgtcaagctcagatgtcgatgttcatcttagccaggattgaatcagactcatactcggcccctgaatgccaacactccagcgtagccctacgcagagtgagaatagcccaaggaatttagtatagcaccgtctcggatcttctgcttggagctttcgcgaaccgctatctcagccaaaataagactggactccggaacaacccgaccgttatgcatcttctcaacctgactcttcagcctcctacatcgatcacccatgcggtgatcggtgggttctcggggacacacaagcagcaggaaattgctgtgtgccgaggtggtaccagagtagagatcctaaagctcgacgagtcgacgcagcggttggacaccttgtacagctcagaggcgtttgcgggtatcaggagtatggtacctttccgactgacagggcaggggaaaggtgagttgacgactgtagtgtgcggtatgatgattgaactaatcagaatcaaactggcccgctcgatccgcagactacctgatcatcggatcggattccggaaacttggcgatagtcgagttccacttgaccccctcgccgaggttcgaggtgctgcacaaggagccgtatggaaagagtggagcgaggcggatggtacctgggcaatggcttggagttgacccgagaggacggagtatcatgcttggagcgtaagtctttgggatagtagcttgaagatgaccgtgggtgccagctaatgttcgctggcggtttcgtatcgtgaagtctggaaaagtcaaaattggtctacgtcctgaaccgaaataccgagggaaagctctttccttcctcgccattagaggcacataaacaaaacgccatcatctcggccttgattggagtggacgtcggattcgacaaccccatgtacgcatgtctggaaaccagctatgaggagagcgacgcggactggaccggagaagcctttgagcgtgcagaaaagatgttgacattttacgagcttgatctgggtctcaaccacgttgtgagaaaatggagcgagccgacggatcctcgagccaatttgctggtccaggttccgggtggacagaacgcgacgacggacaaattcgacgggccctctggagtgctcgtctgctgtgaagaccacatcatttggaagaacatggacgtacccgcgcatcgagtgccgattccaagacgacggaatcccctggccgatgctgatgctgagcctcgtgggctgatcattgtatgcgcggtcatgcacaagatcaaggtaagctgtcaggcatctcccgcgggctcagagcctcgttctgatttggatccctttcctcatcaatcagggtgccttcttcttcttgctgcaaagtgaggacggtgacatgttcaaggtcactatcgaacatcaggacgaagaggtcatcgatatgcgaatcaagtatttcgacacgatccccgtcgcgacaagcctttgcattttgaagagtggttatctcttcgctgccagtgaattcggtaaccagtacgtcaggctgcgatgtgattaacccgcgttcgcgcagtcgattgacctgattcgttctggtctgtagcaacctttaccatttccagggtctcggtgataacgaagccgacgacgaatggatctcctcgaattatgccaacaacgggatgaccgatgaagcccttccctttgcctactttacccctcgacccctcgaaaaccttctcttgaccgattcgatggactcgcttgaccccgtaatcgacgccaagatctcgaacctgttggggattgcgtcggatactcctcagatcatggctgcttgtgggcggggatctagaagcactttccgaacgctcaggcacggtctcgatgtgcaagaacttgtcaactcgggtcttcccggtacccctaatgctgtttggactgtcaaggtcaacgaggaaggtaagagacagttgaattcagctatagtaccttcagctgactcaattccgcagacgagtacgatacatacatcgtgttgtcattcgtgaatggaacgctggtgcttactatcggcgagacgatcgaggaagttcacgacaccgggttcctgtcatcgggacccacaatagctgttcagcagcttcgagactctggtctgctccaagtgcatcctcatggtctccgtcacgtcctgcccaacaagacgatcaacgattggtcgtgtcctcctggaacacaggtcattgcagccacgacaaacaagcgacaggtcgttctcgctttgaataccgcggagttgatctacttcgaggtcgacacggacggcacgttaggagagtttgacgagcggaaatcgctgcccgctaatgcgacctgcttgagcattggcgaagtaccggctggcaggcagagggctccattccttgtaagcacatctgttggctggtgccaggtttcgcgccgctagtactcaaccctgccacaccttgccgcaggctgtcggttgcgagaaccagacggtccacatcatctcaatggagatggaaaacaccttcacgactctcagtctacaggcaagtctgcttgataatcgtatcacgcccgttccatgcctaattgtgactatcttgggcaggctttgacggctcctcccacctcgatctgtctcgccgagatgtttgacaccacggtcgacaagaacaggcccacattgttcctcaacatcggtttgcagacgggtgtgcttttgaggacggtggtcgaccctgtcaacggagaactgaccgataccagacagcggtgagctaaactaatcttggtgttgttgatttcgccgactaaatccgtcgcacatcaggttcctcggatcccaaccggcgaagctgctcaggaccacagtccacgggtcccccgctgttatggctttatccagccgagcatggttgaactacacataccaggatcgactcgagttcacgccgcttatctacgacactctcgaggacgcttcgtcattttcggcagagttgtgtcccgatggtctcatcggtatcactggcaacactcttcggtgagtcaggcagcgtacaagctggcgaatgggcctaaactgatgagttgttctttacagaattttcatgatcccaaaactcggcttgaagctcaagcaggatgtgattcctctcacttataccccgcgacgattcgcctcgcatccctaccaccccttgtcgtatatcgtcgagacggaccatcgcgcctacggacaggccgccatcaacaggatcgttggcgagcacgtacgtcgagtataaatcgaaagatagcctgctgcatgatgtctgacttctgcgcgcatttagacatccaagggcaaagaggtcgacatgactgtctttgatcttcctgctgccgaatttggtcgcccgaaggccgaggccgggcaatggggatcgctcattcgtgtcgtggatcctctcggggtaaggatttttgcaggcgactatgattcacctgaccggcgctaacgttgatcatcacccaggccgaatctttgcagacgatcgatctcgacgagaacgaggctgctttcagcgtcgctgttgtgcctttcgccgaacgaggcggcgagatcatgcttgtagttggaactgccgttgaggttaccatcgctcctcgcacgtgcagcaaaggcttcctccgtgtttacaagatcagcgatgacggccgttctctcgacttcgtcaacaaggcaagtcccgatatctgttgtcgtaaagtcatgctcctgacttatcctgtgccaacatagacacccgtggacgatgtgcccatggctttggctgcgttccaaggtcatctggtggctggagtcggcaaggctcttcgactgtatgaacttggaaagaaacagctgcttcgaaagtgcgagaacaacgttagtgaccacccgagctcatgcctgctctggcttcgagctgatctcgaggtggattttgcagactttccctaccgcgatcctcacgctcaacgtgcaagggacgaggatcatcgtcggggacatccaggaatcgacattctttgtcgcatacaaagccatccctacaagacaactcttggtattcgcagatgacacgcagactcggtggatcactgcgacccagatggtggactacgagactgtcgcatgcggagacaagttcgggaacatcttcatcaatcggttacccgatcacgtcagcaactcggtcgatgatgacccgactggtgctggtatcatgcacgagaagagctatctcatgggtgctgcacacaaaaccagtttattgatgcatttctacgtcggcagcgtcgtgacctcgtaagtgagctataaaaggcattaaaaattgttgctcattgctctatgatccatccatccagtataaccaaggttccgttggtatcgggtggcaaggacgtcctcgtgtacactacgatcagcggatctatcggtgctctcattcccttccagaccaaagacgacattgaattcatgtcaacactggaaatggtgagtctcgaggtgctgtgctagtcgcgtgactgtcgtcgactgagctgaaacattccattcctttagcacatgaggactattggcgtgtcactgaccggccgcgatcatctttcgtaccgaggctactatgtgccggtaaagtctgtggtagatggcgacctgtgcgaggccttctctgcgctgccctacagcaagcagcagcaagtagcaagcgatttggagaggactgtcggcgatgtcctgaaaaaggtggaagggttccgaacgagcagcgcattctaagcagaataagcggccatgttgtatgacaaaatctaacgaccgattttatgacaaattgtgaaagcttccacgactcgatgcgtttcattcctctggcaggttcaccgaccgcacgaaccaccccgtgcactcgtacccatgcggacgcgcctagtagtcgttgttcggcagggcgatcctgccttttcgcgaatggctccagagcttgacaatcaatgccaggttggtgatcattccggcgactagcaacatgatgttgaccggcgtgaaattgccgtgataatggttcttggtgagcagatcaaacggcgtaagaagcagcccgaccgcgcctgacaaggtcatcgccagcccatacaccttgccaaagttggcaaacccaaagacctttgcaaatatatcgctcaagtaggtatagagtagcggccgattgaagacgagaatcccaatcccgatcaattgtgggatcgtgtttggaacgattgtcaagagaccaaagcagagaccgaagacgagcaagatccaactggtttcgatagtcggccgatccagaagcagaccgacgaaagggataccgacgatcccggccaaaggcaatagtaccgtgaaggctgaatgttcagatcaagagagttaatcattgcttcgggtttcagccatccataggttatcacgcacctctggtcaaagtatccgccagcttgacgtttgtgtagaactccaactgagactgaacagtcgcgaggtaccaattcgttcgtatcatggcgacaaacaggtaggcacaaatgatcctacgagaaacgcgaaacaggtcagccccacatcgattgcaaatcgtggtcggcagtgatcgacttgccaaaaccaactgctgctcaactgctccttcaagctcttgccgaacatggctccgatcacgccatcgcccttgccaccgtccagaatctcgatgttctcgtcctcgtccacatacccgctcgggctcactggcataccatagctcaacctcgaaaaccctgaagcgaccggatctgccgacggcgtgtaatgatgcgggtctccgtgatggagtcgacggggagaacgggctcgagcgagctcgtccaggtcttcatcgtcggccagcgtctcgaaagaatccgacggtacagagcggacgtagatttctcttggacctgcgatgatttgctgcaggatgatactgaaggcgggtagaagagcgttccgtcaaagtaagcgacgtttgcaggctgattgcgagtggcatcgccaacgcggtcttacgcggcaggtaacagggtatacagccagaagaacgtccgactgcgatcccgaccatctgtcaactcgactgagtgtacggcaagctcgatctctttgactcacaggctaggtcttccgcccgatttgaagaagacttcccggtagatcaagtacggtacgcttgatgcgtcaaacgctcctgtcagggcggccagtacgacgcccgagtaccgcgggaaggcgttggatactgatcatcctcgagctccattagatcatttcgcaattcggctgaggcatttcggggggaaaggagacttgcagtgaaattgggataggaagatggccactgaaccgagggcgatcaggctgtatccgatgacgtacgagtcgaacgctgtccaaatgttatcagcaagctggacgaccccgacgtgagtcgtatctagattctggaagccgcctttatccagacaataagctcaccgttgttgacgagctgagctccaaataataggttgccgagaagaaagacgatggctcccgcgatggtcgtgctcctggggccgaacttatccaagagcgagcccgctggcaaagcgcagccctagaaattgaacaccggcaagtccatcagcaagaattcagatgttttggaagcagttttgagaactcgcgctcacattggtgatgacagtggctacagtgaacataaagttcatcctggtatcgctcgccgagcagtacttgataccaggctcgcatagttccgaatagacccccgattccatcaagaccggtttcaaagccgcgtatcctgtctcgatagccaggacatcagttcgagctcgtatcgagagactaggtggtgagattgccgctcaccaaagactacgccagcacaagtcagacaccaaacgatgctggccgcgacttgcgccattttcttgcgggagctgatgacgacctcggcgtccatgatcggtggtattccgtagaggtctctagcttttgtctgttgtggacggggttcgaaggtgctaccgagtcgtgtaaaacgaaggtggtcttagatatctaacaatgtcaaattgagtggttcgtaggttgactacttttcgtatcgagtcgtcgtccgtcggttacggttacggttacgccgacgacgacgagaagataaggggatgtttgcggggaaagttgcgcgatccccgagataacaaaatacatccgagcatcaaccaggggcaggggggacacgcgccacgaaaaggaacgcacaaaatggagtataccacacctccgaaaagggcggaatcccgtgaacaagcacaaatcacagttcgacatcaaccctccatcacctcattcagatgcatgtcctggtcagcctttgacgtctgctctctctctgcgtcatattgagtaaattacaagacgttcgattcgatcgtgaacgggaatcgtgaccaacttccgaaccgtctagtaacctgtttcacaagacggcccagtcgcacaacatcagcatcccgccttgttctcattcgactggcccgggcgtatcgacttactccttccaaacatggtccacctcttggcgggctgaccacatcctacacacttctggccctcgggcatctctccgaacctggcctggtcgtgggggatacagagcgacttggcgcccgccgagggggccttgtcatcgacggcctggttcttgttcgagctatataagacccgccggcgttcagtcacactcttaacgcacgtcttttttgtactgctccatatgcccgaccgacttacatggcagcgctcctctccttgatgtcatcctcgcacgcttcagcctcgcaccaaggcaagatcaagacgttcttggcgtccaggttgggcacaacgtcgtcaaagttgtcaaccttgacaatgtggtcgtcgtacgcctttttggccttgtcaaacatcaagtagtggatctcttccagagtggcagggatggtcgtcttgatgtcatcgttggcgatctggaacttgtgaccgtcgacacgtcggatcgccttgacctccttggcagcgagatctcggggtccaatctcgagtcggatggggacgccctgcaaaagtcgacccaaacatgtcagctcggtcttgtcgagtgggcaaacactttgctaggtggcactcactcgcaattcccaatcgttgaacttccaaccgggagtgtatccatcccgaagatccgccttggccctgacaccgatgctgatcaaatcaccctccatcttcttgcaagcgtcaaagatgacattcttctcctcttccgtctgcttggcgttgagtccgacggggacgatgacgacctggacggacgacacgcggggaggcatgacgagaccctggtcgtctccgtggatcatgaccatgacaccgatcgttcgggtcgaaagaccccacgagttttgccagacgtgcaacttgtctccactgccgttgggatcctggacggtaatgtcgaacattttggaaaagttttgtccgagacagtgagaggtacctccctggatacctcgaccggtggtaggaatgtaaccctcgacggtggtcgtgtacagtccaccggcaaacttttccttttccgactttactccggggataacggggacggccaagaggtcctcgtatactcgtcggtacaggtcgaggatggtgagcacctcctcaccggcctccttttgcgtcaaaaaggcggtgtgtccttcttgccacaagaattcacgggttcggaggaagggttctgtgcggaggcagcagaatttgcgtcagccggttccgtgtggatctggcaggccggtctgaaaactttgactcacgagggttcttgaactcccatcgaacgacactgttccactggttcaacttcaaaggcaaatccctgtagctcctgatccacttggcgtagtctgtcaagccagtctcttcagtccaatgtcgctgcgttgagaaggaacccgtgcgtgcaaacgctcacaagggtacatgacagtctcggaagtaggcctgatggcgataggttcttcaagatccttctgaccggccttggtaacccaagcgacctcgggagcgaatccctcgatgtggtccttttccttctccaatcgggaagccgagacgaacatggggaagtagcagtcctcgacgccaatcttcttgatctcggcgtcgaaccagtctggaagcaggatgaaagaaagcgagacataggtcaatgggcgagtactttgacagaggactctgacgcttctagctcactctggatgtgctgccagacggtgtatgaccagggtttcaggatgtaacaacccgaaacatcgtagtaatccaacatgtctcccttgaccaagacctacggtaaggacgaacgatccgtgtgtcagcatcagcagcctcgccttgagggaatcgtcccgttccgtccctccaggcttgatgatacttacgtccgagtaccaactggaaaagtcaccctccttggtataacccacggccatttcataggcatcttccttctttccatcattcttcttcttctcgcccttgggcgcggaagcgaccggggcggcgttaccccgctcggcgacctcgtccttcttcatgctcgaaaagtcgacctctcgaatctggacattcttcagggcgttaggttcttcggcggtgtcggtcgactggatcgactggaggtaagggatgaccgaggttccggggatgaggaaagttcggttccacgagttggtgtggaaagcgacaaggtcagaggaagaggagatcgagctgtcgacgaggatgtgaagggtcgaagggatgggaccgggaagcagaaagggagagactgaaaaggtacgagaaaggtactatcagcatcacaaccgcaaagccgagcgggatcacatgtccgaaatcgactcacgtcctcccttgccctggcaaccgggcaagacctccttgacgagctcttcctgggccaacctcagatccttcatgttcaagagctttccgagggcggcggacgaggtctcggtggtgtccttggcgatgaccatgacgggggtaggagcggcgctcttgggctgcttgggcttgaacagaagctgatgggcggcgcgattgtcacgagtcagtccggcggctcagatctgtggaagagcttcgcggtcgatgacttacagtcttactcagcgaaaagctctttcccttccattcgtctttgcccttgagaacgatgtcccactcggcagcacccgggcaatgctcatgttcgaccacgggctcatgggtgatcttgaggttgtccagacgggcgaggatgtcagattcggtgatggcggacattttggggaaagggatccgagggcgtttgttgtgagatgcgagtgtagggcgggtcgcagtagcaagagtacgggcgaactgggttgtccgggtcgggttcaggtggtagcggttatagctcgatgtgaactgcttgatgtaggtgagattgactcggctgctgactcgactgaatgcggtgcagagagcgcttgacatgcagcgaccaggaatccgggagtggaaagggaagagatgaatcaggatcaatctatctgaacggaacgagcggaatgtcgggaggctcgattgacttgacgatgcctttgatgtctctaccccggttcgataaggctccgttgaccgcttgctttgcctgcctaaacctatcgagagagatgaatccaattagaagcgcaagtctcagatgagcctcatgccgtaattacggcatgacatcgcagagcgcatccgttccgatcggaagtatatccccacaattccggatgtaacttgaccacctgactgctctcggtcgtgcccgtctcatcaccgtatgggccgagaggccgagaacccatcacatccgacagcctcgcatatcagatcgaaaaggttcgcagcatccagcgacgaacagacttcggacgtctcagaacttcgacaatttctaatcaactatatactagcacgatgacgccagctgacaagtatcgcggagccgtcgtcgaagtaagcttgtctgcacgacgagcccgtctctgcgttcagagcagcctgctgatccattctccgactttcgaaacaggacctacaactcccgccagccttctgccttccagaaggagcccctactaccgcagctctagaagctgcttatgagagggaattcgactacctgccgtcagtcatacctagacctttctcgttcgcaaccgtaacatcattaatccttttcggtttcgattgtcgcagagtattgaacgacaagcgtaaaccgatcgggtacttggacgtcaccggtctcaaggcaaagtttgaagctgggagcgccaaggaggtgagcactttgaaaagaacaagaacgtttcggaccgtcttcgtaatctgatatcgctgctccggcctgatctgatctcatcaggatgaacccgtccgtgagtaacccgatcaccgaggcgtggagtcagtcccgaaatgttgacgatcatctacgtctggtaccgatcaggaaagcacaccaccctctttccgccattcaatccaccttcctcgccatcatcgaccgcgacggtccgaccgtcgtctcatcgataccaggtcatccacccgctcactccgctttccgacctggaaggtttcctgcagcggcaacaagggcatttcgcgctggtcacagatagggagagaaaatgggtcctgggtgtcgctacgggcgccgatctcgaggtcagtatcggtagcgtcgagtagcagtctcggtcccgtggctaaaaggacctcactcgacatgcagacctttgtgaagaggcggggagggacgctcgaccaggtaaacgggaccaacgtctgagcgccttgacgtcaccattagcaaggaaacccgttaccgtcatttcgttatcatcgcatgtatacgcgtccatacaaccctggccgtgtcacaatcattcggattccacgagataccctttgagatcgatcttgagcgaacgagcgaacgccatgaccatgtccttgggcgcttcgcaacggatcaaaatctgatccaagcgatctctaggtgtggtccgctgcagcaggcgcatactttccagttccgggatctgtttgcgtgatggacatccgagagcgtgtcagcggtgagcgattcgatggcggctaatgtccggctcaccaatccgaataaaccaacgctcctcgagatctcttcgacctcttcttcccaatccctcaacctctccttgtcccgacgtcgttccctctcacgccttttcttctcgacccgtccgacgtcctcttctatccggaaatccagctttcccgcaggtcggttgacatctgaaaacgcgtcgtcttcgtcgtcgtcatcacccgcgcccatcccgttctcctcgccctgctcgtcgtcgctgtccgactcgtatcgcgtaggatcgaagccatgttcaaacaggagcgcctggaagattgccaagagccgttcgagggggaacgacctcggtcccaagaggtattgaggaacctggaagaaaacatcggcgtgcgtcagcgcagcactggtttgtacgacgtccgccggatcgctgctcaccttgcccactttgccgagtttgatctttttcaacccctggcccgtcttgccgcccgctttcccaccgccctcgtatccagttccgttcctttcaagtcccagccctgctctccccttgagacctgaagcgcttgtcaatggccctcgtccaaacattctcatgtcgcttttcactgaattgtacgatgcgcaatacgccgccagtacgaggtattttgcgtatagtggtagagccgggacggatggtttgaggacgatgggattggcggctaaccgaccgacaggtagaggagccagagtcgacacacttgccgaggcgggttcatcagtcgagcgactggcactggggatcaagtcgaaaaacgccttttccgcgtccgtcttgggtccttccgtcggccctctttcctcctgcttgaaagcctggacaaacgtctcaacagggatcttgtccgtgatcaaatgttcgttggcgagcgcaaacgcataggtcgatcggtttttcagttcgatcaggagcgaggtcgtcaccttcaattccggctggggaggttgatcgacctgcatatcgttctcatcagctggtgagattggagcttgcttgctgaccagccccgcggtgtatataggccagagagctcgtttgagccgggtcagggtcggtatcgtatcctgaggaatgaggtgcgctgacgtcgcgtagagcagcgaaagaaagtagggatagaccggagcgatatcggccgggcctcgacgttccagggccaacagggccgagatgacctctatagacgagcgggacactctcggttaacaaaactggtcgaactcggtcccgactcggttgctcaccctctttggtctcgcgcctcaagaacaatccgagcggctccaccgaagatcccgatacaggtttcacatcgtcccatgctttcggggaagtcaagatcaagctcgtcggatgttccatctggccaaaaagacccgattacgaacaatctttagctttcgaacaagccggtccgagatgtcgtccgaacacttaccatcttgaacaatcgtagcatgctctcgaaagcagtcccgatgttcttggccaacagatgcgcatcctgcagtatgattaccagggttcttcgtgtgacgcttgccgttccggtcatgtcgaccgcttgatccggctgcgcatcgtcctctcctcgcttacgcttctcccccacgttggcctccatggccgtagcgtccgcttccatgacgcgtgaaagacctctgacaaatgtgtcccattgatgaacttccctgacccgtcccttttcttggatttccttctggacactctcggggaaaaggcataggcggacgaggtgtaagacgagcgtgtagagtgatttcggcgaggttaaactggtcgctgggatagtgaggacgatcttgtcatgaatgatccgagcggacgaggtgggtactgtcgccaaggtaacgatcgactcgtcttggatgaatagaggagcgggtaaagcgtgaggagacgagtggaatgggtgatgaaggtagatgaacggtggtggacggcgaatgcgtggcgacaggtacgtctcgagtgggttcgtcgttgacatattgttggatatctataggctgccgatcttgaagtgttacaatagttgcaaggggagatattgtttgaaagactgtcgatatcgatagatgatagtagaccactgagcggtggggtaggttgtggtagtgtggtagtgcatgcgtgtttactttgtcaacttcctatcggaagcgaactcttccttgctaccagttcactctaaattgcgcgtcgccctcttctcgacctcaacaacgtcatagctacttcgagtcccgtacgaggcaattcatcaagaggtcatcgccgccccctttgaatcgattcaagatacatcagcacagccgtacagctcaatctcacgatagtcttgcgacataccatccatcgactgaacaaatcaacaacatggtccgcggcagtgatatcatcctcgtcctcgtggcgatcctcttccccgtaagcctcggtgatctacttccggccaggaccagaagattgacaactcatctccctcctccttgttttgcctgtagcctgcatcggtcttcttcatctctggatgcggttgtgatctcttgatgtgagccgtcgacccccttccatcatcttttgtagcaggacaactaaactgacccctctcttttgtttagcaacatcctcttgaccgctctcggtgtaagtcgacatcatcgtccgacacttcctttatcctgcggctcacgctgtccgactgacctcgtacgacgtccatcttagtacatccccgggcacatccacgctttctagcaagtcgcactcgctcgcttggtacatcatgtatccccatgggctgaccatcttcctcctcttcttcctttcccgaaccaccacagcctgatctacaagcagatggaagcggatgccaggttcggacccggaaactacgtcaacctcggtagcggccactttgagcccgcccacggtgtcggtgagtgcggctccaccggagatccgtcgtcgatgacgacgacaagagtcgtcctcggtccgaaatatcgaaactgatccccatggatgtacctcacatattcggctgggatagcttatcaaccgatcaaccctcagcctcattacggctcgaccgcttgaaatggacaggctgaccgatgatagcgatctttgcactctgctccacttcaccctctattcccttttaccgcgctcgctagcttttgtagtaaggaatgaactcgtcgtccgaatcgcgaaatgtgaatatatctgattgatcaccaaagtcgctcgtctcgagagaccattcaagcggagacctagcgcagcttggatattcggtacatcccgtacaaggtttcatttagcaagactttacatttatgcctcaatagactccgacttcgccctccaggtaccagttatccttctcgtacccctcttcgatgatcctcaaccatttgcttcctcgctccttgcccgcctcgtcttcatttgcctctctgatagcaaaatccatgcccttggcagctgcgacaacgtcctccctcaattcgccctcgacaaagaggtggtagtatcgatgaaagacttgtcgttcaggttgcgcttgttcagggatcgccatggccggctcgtcagatggtgttgcatcttggtcttgtcgtaatacagtctcgtcgttatcgtccgtcgtcgtcgttgtcgtggtgtcgcccgcttcgcccgtcgagccgtcctcgagcccgctcggcttgacattaccaggcttgcccttgttcttcctcggtcggggttgcttgacctttttctcctgcggaccttgcaggacccagggtaccaaaacgtcctgatcctttttgcgctcctgtccaggaggacccgccatgctcgaatcgtcgtcctcgggaggactggccagtacgcccattttccgcttgctattttcgccttgctcgtaggcccagacatagacgatgaatttggagaacggtgccgccgaggagagataaagtggagcaagtagtgagcgtatagactgcactcgccgtgatcgagtcgacaggtgatgcacagcagcgatcgaaatcgcaaagtcctgtccgagtaagatccaggatgttgagcattcgggcagagtgccttgtgcgggagggatgggcgccactcacgaatacaccatgtctccagccatcaaacgccagatcacctcgcacgcattcttcgactccgcctacgacctcgtcgccgatttcgcccttttgtgatttcgccacgctgagtaacccggaacttcggtccaaggcgatcatgcgactgccgtgacttccctctcgtactactgggaggtatttcccattcccggcgcccgaatccaggccaagcgaatgcggcgggatcgacgacagaaatcgggcgatgatcggccacggcttgtaccgcgtctggctgaaatgcggggcgatcgtctcgtagacgtcgtgcaccatacgctgttctctggcttcgggggtttcttcttgatcgtccttgaactcgctcgggacgaccggaaccgtgggctcgggcaaattgggggcagggccaccgatggacatcttcgcggtcgatcgcgtcaaattcgcttcgtctgcacctttaggtcgcctcgaggctatatcccgaaggacaaaatctagccaggcgtctcccttctcctgccctgcagtcccgaattccacttttagaggatctctccacttgtcctcctcgccagcctctggtaggtatcgctcgaccttggccttgacccaacgctcatgcatcgccttttgccacgacgctgccgtacgtccttgtttaccgtaattgttcctctcttgtttcgtggtgagaagttcttttagttcgtcgctgcgcggaggtacttcgcggtaggatttcagcgtcctggaagcgcaagcaagagagaagagatggacgataagctattctggccagagttgtgactgcatagaaagactcgccagtatccgaggaacgtaacattggctgacgtgggcgggtgagacatatcactacccttggtacgtgctggttgaccaaagaatggaatcggacgaccaagattctcgggatagtcaacgacgtcttgagaattggtgtggaaccaaagttcgttttcagtctcaaacaggggatgcgcatcggggacgatctgtatccaggagatgatgtgaccgtgtgaatgcggcttattggcatcttctgagcccgctaaaggatttaggtctgctgaagctgtcgttaaaaaatcagatggcgactcttgttggatcttccccttctccctttcctcttgcagcatctctttcacgcttttcctcggcgcctgtggaggtacgtagctaaacagattgattgtatccatcctctttcctcccaggtgccccgtcaactcggagaacgagtaggtgaggactccatcgctctcgtctaatgtcctaggcctactattgtttggcccagctggagatgtcgagtttgccgcttcttgagcctttcgtttccaaggtggaacgtaggcagacatcccgattaatgtataggctaggattgaatagccaaggtatcctcgaaccagtcgagtcgagatgcgagatgacggcttgggtgttcactaccatgatctactcgatcaagcaccgtccttaggaaagagtggttctcgaaataaacatccgaaacttcaataatttacttccgaagtcgaccctcccttcaaatgctgagctcagcaacgtccgagatttctagaaatatcgcttcgatagttcatccttcatcagtccatacctatctctcaagccgtttagagctcctcttggccctcttgaacaaccactcgatctgatacgataattatcgccgctcaccatgatggccaagtgcaccaacacctcgtgcggcaaggagttcgatcccgctaccagcggtcctgaggactgtgcttatcaccccggtggacccgtaagtcctcagtgagagcgggctaaggagccccgtgttcaggctttaatctcttgtcacattaggtctttcacgaaggcacaaaagcatggtgtaagtactagggcgttcctaaacttctatcgattgtcggggacagtcagctgactgatcgcaactgtcatcaattcagcttgctgcaaggagatcaacaaggtgagcgaggtccgtgacagggcttcgaacgagcagtactgaaaccctagatcgtgtgctagccggtcttggactttgatgatttcatgaagatcccagtgagttactgggactgaccatcactgcctagcacaagtccggaagctcatgccatcatcgccgtcagggatgcactaaaggagcacatacatcggaaaagcaaaccgctgcgcaacctctttcttcgcccaacgctcagcccgctgcctcggcttccacttcctcgcaacccgctccctctgcgacgaacggaacgaccgagacgtacggtaccgccaagtctacccctgttactactgccaccaccaccgcggccaaacctactttggtcaagccggaaaagatcgactgggccaagaacgagctcgtcgatgagccttctcgcccggtcagcaaaggtaccaagtgtaaacgaaagggatgtgacaagcaatgggacggagaggacgccgcaaggagggacagtcggggcaagctcgaggaagagcaggattgtgcttatcaccctggacctgtgagtcaagctacgattccccatggccacatcgcgccaggctgaccatatgtgtaccgtacgaatgatccggaacagcccagctttctggaaggttccaagggattcctgtgctgtaaacccagagtcctcgactttgatgatttcctgcgtcttcccggctgccggacgacttcgcaccagttcttcgatccggctccttcaggagacgttgagaacgtggactgcagactggatcactaccagacgcccgacaaggtcatcgtgagctgtttcgccaaagggtaggtttcctagcatctctcacacaggcggttctcgagctcatttgctatcctttaaacgtagtgtggacaaggcgcaatcgaccgtgactatcagcacgagcggcatcgatttcgatctttacctcccggccaacaaacgatgcatcaagcgagtcgacctttataacgatatcgacgccgacgcgagcgagtttaagatccttggaaccaaggtgagtgttgctagaatggatatcggcaaaggtcgtgatgttgagacggtctcgaacctccccgccccctccccacccctcttccgcagatcgaactgaacctgaaaaaggcctcgtcggcatcctggccgctgctgcagaagccagctgacgggatgaagttgccaccagggtatgccctgacattcggcgtaaagggccgaaccggtacggtaggcggcaaggacatggttgtcgagtaaaggtcacccatgacaaggtcgttcgcaaataccattcattatcaatgcaagaagccagcttggggtccgtgactattgctagggcgctctttttcccgtctgggaaatgctacaacgtcttcctccttttggggctcattctctataggtcttcaattttccgcaaaggttcccttagcagggacgcttatgtaccgcctcccgtgcgctcaacgggtatagaacgcgactggctccgagcgaagctactgtcgtcagcgtgcttgccgatcgattcctccttcgtcagctcatgagaaaccttgtccatgccggccaaatgtgtgaaggcgttgtcgaggtgaagctccttcattccagcggcaatgtcaagaaagtcgtggaactcaatgttgccctttcgaccaaagtcgacctcctgcatgatgttgtgagctatctcctccttctcggcgtaacccatcctgcaacgagcgatagcggttagcaatgcaatgcgcgtccgaaaaggacgcagcgaggctcacttttgcatagcgttcaggaggtccttctcgtcgatggcaccgttgtgatcagagtcgaggttctcgaacgactccttcaaatctctgacttcctccgcgttgaattgagctcgcatgtagagctgagtctgatccagaggtccgacaccgacaccggtgatggcagggatagccttgctctcgacgtcagacagcttcaagcttcgcaagtgctaggtgattggagaactcagagtcagcacgcctaatatacagtctttgaattggcccaacggacgtacctcgggtaaacccatgctctccaagaacaccaaggtgtcggtaaactcggtctcccttcgcttctggtcccatccgagttcggcgcccatgatctcgatgaccctgggaagcgcgtccaaggtggcctgaacgttcaagaacgacaatcgggtacgacgagcgataaagtcggtggcgtggacggcgtactctgagcggcatgcgtatcgcgcctcggcctcgatgtaagggtagaggttggacagacggactccgtgcataggccagctctgaccagtagccgtggccatcgaagcgacggtccaggctcggtcaccgtaggtcgaagacaaatgcttggcgacctcggtgtcgagtccgaattgctggatcagcttgatgaacatggtaggagtccatgcatgggctccgatcaacttgatgtgctcggtaagacacgggccttcaggcttcaagtcgtactccttgacggcgtaatcgacggtctcctcagccatcgctcggctgagaaagtaaagtcctaataagtaccggtgcacatatctcaatgtagcggagacatcctggacacttactaggtggtccactttcctccagcaatggtcaacaatccaccgtcggatacgttgatcatgtggtttcgtaccaatccctgggtgtccttggcatcggggtctcgaaccaaaggtcgaatgccggaccaggcggacaatacatctcctcgcctgaccttgatgtcgggcgacaagtacctcctgacctcgtccaagatccactggatctcctcctccttgggaatggggtgctgggtgacgtcggtaggcgagtcggtggtaccggcgataacgtttccttgccagggcaagaagaagatgacacgtccgtccgacgtggcggggtccaagagacccatacccttgggtccgtagtagttgggcagggtgatgtgcacaccagagctgggagcgacgatctccttgacggtaggctcatcgagctttcgcagaccgtccgagaagggtccggtagcgttgatgacacccttgcactcgacgtcccactcatcgccggtcatacggtctttgagccgggcaccgcagattcgaggctgtccaccgtgagcggccgagggcttcttgtgaagcgcgacgacttcggtgtagttggcagcgacggcaccgtgctgaactgcggtcatgaccaacgacatgttcattcgagagtcgttgtgttgacctgtgggatgtaaatcggttcaatcaatgttccgccaacagcggcatttcgactattgactaaccgtcgtagtaaacgactcctccgacgaggccatcatccttgagcatggggaaagcttccaaagcctttcctcggcccatccagtaggccgattccatgttctccttaccggccaagaagtcgtagagcttgcaaccggcatagtagtaaggcaattgccaccacgtgtagatgggcaacaagaggctgatgcccggggggggggggaaggtcaattcaggacgacggtcgaagcgtcccgccacgagtcactcacggaagcatgtgggaaagatgaggagcggtggtaaggaagatcttcctctccctcagcgcctccttgaccaacttccactgctcgtaatcgagctcgaagatggccttttgcaggtatcgcacacctccgtgtaccaacttggtcgatttcgacgaagtccctatgtcagagaacatagcgccaaatcgagtcagccaggggcgcaatacaggtcgtgattcgatcagcgcccagacccacctgaactaaagtcctctcgctcgacgcaggcgaccttgagtcctcgactggcagcgtccagcgcgacaccggcaccggtagcaccacctcccacgatgaggaggtcaaagatgtcggtgctgtcttcacccttctcggcggtcaacgcggtagggttcgccttgactccggtaggtgcctcgctgatggcgagatcgctaggaggcgcaggagcgacgagcgatcgacctgatgttttcagatgcttgagcatctgctctcgcgagggagccgaccatagaggtccgggtctccgcttgatcgaaggcgaagggtcggcctcggcggcgatgggtttggtgaggtaataagtgctcaaagccgtactcgtcaaagcgacagtggcgatggtcgtcctgcgggacatggaagggagtcggcggaacatggcgattgttgatgttccgggttgtcaaggtcctatctgtggcaaaggtattgcacgtttcgcccccgtagttgtaggcgatcggctatggcgttttacagacaaagactgtccaaggcgcaaatgtcgagtggatggcaaagacgattgacgtccaaagatccggcccgacgttttatatctagttcggtagtggtagatagagcagaggcgcagaggcgggtttgatctcgatgtcttgttgctgttccgaaattcccaattcactcgatctctttgagaaaaggtcgctgctgtcgtgagtgtggtgcggtctcgtcaatcaaattccggcccggggtgaagccgctcgaaaaaggtgcggaagctaaaaagagcggttgatgcgttgatgggcaagacggcgactctctttcgatgtcgctcggaaatgccgtttctggtcgtcaaaatgcagtccttctctaatcagctgacaaggtgtcactatcgattcgatggttctgatcacatagatttcctatgtactttcgaggaatgcccgctcccccccactgatctttcgcactagtcgcgatcagaggcaaaaggaaatcgggcgacacatcacggctcgatgagctgcgtctcgctgtcattgcccgaacacggctacctcggctcggggagtttctcgaaccgttcgccacaggcccttgcctcgcgttgggttcccctcgatgctccgccggttcgggccacactcttccccccccccctctctgctttctgtagttctcccccgggcttttaggcgagaaagatgacgtctgcaaaccacacacacgcgcgccaaatcaacctctttcgctccataaccactcgccctctcgcttccgtttcgaacctcctctttcgcgcgcgaggaaaagagaagcctaggtagagcagcggcagctcgcacggagctctagtagtggcgacggacagctgtcatccctatccaaattacttttttttctatcctttctgtgcggacaatgtgcgggtcgaggctggtctcgtcgacatgtgggggggtcgacatgcgattgggaatgcaaatgctgcgtctagcctgatcgaaaggccaaccgggcaaatgagatgccaggcgagacacgattcagctagcgatccccccgcttctccccgagcgacttctctggctcgtcaaccgtcgatcagcctacgacttggggtccccgatcaaagcatggttgggcaaactgatgtcatgttgttacaatcgattctgattcgctttcgcttatacttcgatacgagcggcgttcacgcgcctcgattacttgatgatgcctagtggtacaatcggattcgaaaccgagtcaaaaaatctctcatccaactgggtactatagcttgcccttgggcaatttcgagtcgagctgagcgtaaagatcagacgtcaaaaagtcgctaggccattgtttcgagagctgcgccatcatgtagctctttgcgacgttgacgtgatccgtcgaaataccggcaatcttggcgaccttttgcgcctcttcgtcaaagatcgggccgaggtgggacgacgtgatcgtcttgccggaatcctatggcggtcgatggaatgaaacgcgagtagagcgaataagcgacgttgtacacgtgatacgaacggtggactatgacgtactgtcttgctactgtatttgacccactgccaaagctggactcgagcgatctcggccgtcgcagcgtcctcctgttgccggcgatgcgatcagtatcgatgggcgtgcccgaaatcgtccgactcaaacgtaccatcaggaaattgataggaacacatccattacccgagatccaggccgcacaatatgatagcgcactacaaggccaagagattccgagtcagtcgcaggatctgtgaatccgtgcacgttcgagtcaagacctacgccgaaatgttctccctgactcccttgtcggtgatggctcccgggacagaagggttgacgagatcctgctcggtgaccctgacctcttcccttcgaatatggtattgatggggaccaggcatgtgcttgtcaaagatgtccatggcgatcttgaccaatgccggatgggcgacccaggtcccgtcgtgacccgccttgacctctctttctttgtcggccctgaccttggacatggccttttcgttggcagtgtcgtcccccttgattgggatctgagccgacatgcctcccatggcggcgacttttcgcttgtgacaggtctggatgagcagcttcacgtaggcctccatgaacgggaccgtcatggtgacgtcggttcggtccggcatgacataagtcttggaagctctcaatttcttgatgctgcacagaggtggtcgtaatcggtcaatgtcagtgaatgtctcgacgtctcaacggcatccaatgatgtactcactagctgaagatgtaatcccatcgaccgcagttcagtccagccgagtggtctcgcaattcgtagagaatctcctccatctggaaggcagcggggatcgtctcaatcaagacggtggccctgatggttccgtaggggaatcgaatgtaggcggcagaaaaggtaaaaatgtcgttccacaacctagatgatgtgttgcatgacgaacggtcagactcgacagttcttccgaaatggatcatatccaaggcttaaactgacctagcttccaggtgatgttccatcttgggcaggtaaaagtatggaccacttccccgcttgactagctcgtgagcgttgttgaaaaagtacaatccaaagtcaaacatcgacccggacaagggctctccgtcgacctggattcggggttcatccaggtgccatccccgtggactgtaccggcgattgaggtcagttcagatagtaccaaagtgtgaaggctcggcacaatccttactcaccgaacgagaaggacggccgggttctctggaagtttgtattgcttgccgttgagctcgaaatcgatctgtctcctgatcgcgtcgtacaagttgacctgtccgttgaccatattgttccacgtcggcgagtttgagtctacatgacagcatgggaataagacgatcagctctctgcgcaagcgcccttctgccgattttgacatcgagctcaccctcgaaatcggccatgaacgtcttggctccggaaccgagagcattgatgaccatcttcctgtccgtgggcccagtgatctctaccctcctgtcctccaatcccggtccggggggtgcgcaacgccaagcaacatcctccctgatcttctgggtcgagtgcaagaagtgtaaatgcttgccagcatccagctcggcctggaccttgtcccggttggcgagaagctctttacggatagggttgaatgtacggtggaggatcgtcaggaatttcagtgcttctggggtgaggatcttggaggtagcctcgctcgagggagagtcagctgatggcaagaagagtgacgagagggatcagaggtcggtcatggatacgagcgttcccgcagctgacagagacttgcctcggatggacatgccgctaggagcttgtaacgaggaagacatgttgtagtgttgatgtaaaatatccgattcgtaagaggatttcaatatgaacgcgttgttgccttgttgaaagcgtctcagccgactgatcttggttatttctggttatcggctgaagttcgagctcgagagttcagatcggattgacgttagtgggatcgtgctatggctatatatcttctgccgacgccgacggacggaagacaagtgtcgagacacggatatggttagacaaggatcgagcggtagtggtggcttggttattccgtcgagcaaccggatgagcgtcgcattggaaaacccggacctagtcgacctcgagatcgttggaaaatgcccaaaccacttaggggcagaagagagagcaagacgagggatcccaattctatgaatttgctcccgagctctaacgacccgtgattccctatctcttcggccgggaacgtcgggttttctcgtttcgtcatcacaaacccggttatctcgcacgaatgagcggaagcgacaccccacttcttgaccggaagaggatttgagtccgtacaacggttcacctccatgtcatcacgtgatacgtccgaacaatggctgacgacatctccgtaggtctaggccgagtgtcgagcgacattccacgaaagcaggtcaacatcgtcgtaagtagttgataacaaggtagtagttgtgtccagacttgcaccctcagccggctagttgccaacttcgtcgttggcatccacatcaaacgtccatcatggaaacgatcaaggccgtgttgcccaccagtttgactggcgaacagtctcgttctgatctcgctctcaagctggatcggttcaagtttgagcgcatcctttcccagggtacgtgtatattctgtacaactcggctatagcaaaggctaatccattgggtataacaggaacgacaagtccttacatatacctcttaggcaagatcgatgacgagcctgcgatcgtgcatctccaaagggtcgctttcgacgttccagaatcgtcaggtgttcaattctcactcgtctcgcaactcgacaaggtcaaatctctcgagaagaacgacattgtgagcactggccgttgacatttaagcttgatcataatactcattcagattgataactgttcatcactacagtacgaatgggctcaaggatggtacggctcagacagagcggccgacgttaaagtcaacatcatccatccgtgtaccgctacgcacatcaagaaggtcagtctcgaccctcatttcccttctcttctgttctagacactcagatataattttgcgaatcgttctcaatagtattccgctcagaagaggttcatgatcaacgagacgcccgagatttacaggaacgtcgtcaagccgtacatcgatagcttcccatcaagcaggatccaatggcgagttcactaccagacgattgctgctcgatcgtggttctcttttggcttacagatcggtctatcagggtgtacaacgttctcgagcacaagaaagaggcagacaagatcgtatacgaagacaaggacccggagactgggtttatgatcttgcccgacatgaagtgggatggcaagacactcagtgcactcgtaagcaacggaattatcaagaatctgtgcttgcacacgggatctgaccgaatgacttgataccacagtacctcacagccatcgtccatactcatagattgaaatcgatgcgcgatcttcggccgtctgatctagatctcttgcgcaagatcaaaaaggccggcgaacaggttatcgtcgagaagtacggtatgcaacttgggggagcgaggttgttcgtccactatcagccttcgtactaccacctgcacgtgcatattgtctctttgacgaatgagggattcgccggtgcagatgtgggcaaggctcatctcctggacgacgtgatctcactagtgagctctgacccatcggctgaccagcctccagaaagctaacgcgggttacgtgtagctggagcaatcgacttcagcggctggacaagactctctgctacagaacatgactttgacctatcatctaggagaagaggatgcgctttataaagctttgaccttagcaggagcgactgaacagacaggaagttccgctgtctcatccaaaaatccgagaactgcatcgttgcaagccagccacgctgcatgggacgccgatgccgacttgccgatctgtacagcttgtggcacgcaatatcctgctcctcgtgacgagtgccccatttgcgaggatgagaggtgagtcgctaggttgaaacccccgatcatagctcttgtcactggactgaagatgagttctcaggcaattcgtaccatcaagcggccagacctggtcttcattgaaagagctagcccaagctggtcacaagaacgaattggtcaaggacagccaagacgaccgtatatctctcatcaagaccatcccctcgtttgggatcggacagacccgtgagtagacaggaagtgtcaacttttggactgctggatcttgctgattcccttcaccgtctatgtagcattccttattgaaacggaccgcggatcgtatgtctgggactgctgtgctttcctatctgagcatctaatagtacagctacaagagttgaagacaccactcaaaggaatcgtgatctctcatccccacgtgagcgatatcatacttagagtagtctgagaagaagtactaacagcctgttatcagttctataccacgtcgctcacgtgggccagagtcctggctgtaccactcctcatttgcggcaaagacaagagctggtaccaacgcctgtccgatgtgaaggaagacgaaatcgtctggtacgatgaagatcatgaattggagcctaatctcagagcactacgatgtggagggtgagtcaagcgagcagtcttggcaaggtgattcgatagtattgaccataagagcttgtcagacattttgagggttctgctatactgtactgggatcgatcggcggagggatcgtcctcattagagggctcccaagggcgtcaggacggaattatcttctgcgctgataccgccatggttcagcctactcagaaaggctttacattccaatactcggtgccgaacatggttcgcttttgtctggactgccataacccgagcagccatctgataaaattggccaaatagatccctctcaatccatatgacgtcgcttatctgtacaagaagctcaaagacctcagattcggccaagcgacgtcgacttggcctggccgcttcgtcagggagaacgccgatgctatcctcgctcaaagcgttcgtaaacatctggaaactatgggctgcgactggctgtggatttccctatctccggactcaggcagaggcgcagccggatcgacggattggaaaagtgccgacattctgtctcccgatgatactaccagcagagccaaacagagcttgatcgttttgaaccaaccgatcacgcgccgtgacattttcgacaagctatgggataattgcgattaccgaatctgtgcggacgggggagcaaatcggctgtacgacctgctcgataagggagatcgccatcggtaggggttttctaacatctcgcaagtatacttgtcgtgctgaagcgcttcccctcgatcgatagtttcgtacccgacgctatcaagggtgacctagattcactgcgagatgatgttcgggcttattacgaaaacaaggtaacttctcacgcttcagcgaaacgcttccatctgcgctgactgcggtaatcttgcagggaacaagggtcctccaagatgagagcgagtatacaactgacttgcaaaaatgtatcgaagaaatcgacagtcaaagcactcagatggaaagcagtacggtcatcatcttgggcggtctcagtggacggttagaccagaccacccatgtactggcgctgctgcagaagttgcgtcgtggaaccggcggcaccaatgctagagacgaggaagccggcacttcagcatggcagggaagcgacttcaaggtgtacatgggagatgagttggtcagtaacagtcgaggagaagatctttaccaggactttggaaagggagacggtaccaaggatatcagagttgtcagcgagaattgcgtggcctgggtgttggatgtcgtgagctgctttgtcgcggatacaaagttggccttcactaagtattttgcacactgaattcagggagaacatgtcatcgagattgatcacgaaacgtacgggccgacctgcgggatcttgccattgggagtcgagtccagccatgttgagactaagggtcttcgatgggatttcggtgcgtaacgattacgcagtctgatgattacaagctgctcatcttgagtgaatgcttgcatcaaatccagattggcagacagctttctcgacccagatttctacgtcgaatcatctcgacccaagaagcaagcgagtgaccgtgcgaacatctcgtccagtttggtggacaatggaaataagggatctcgtaccgggagctggtgtcctaagcagttagcgcatttcgtacgccttgtacacatatagcgcaatcttacgatcttgaatatgttatgcagatcatcgcatgtcaatagcgccgtcaatcctgtctgacccttccttcgggttccttaccaccatgcgctgtaacgtgcagacggaccggactcgctcgataccgctgctagataaacatgtcgagcggctcgtctccgcgttgtctgtctaccagagctcgtatcaagccgcagtcagtctctaccggcgagagagtgtcgagcacccgtctcatcttgctcacgctcaccttcatgacagccagaacattcggaaaccgaaaggcaagccaggactttgatgccaaccggtctaaaggaggcgaccggtatcactcgtccaatagacgcatcagaagctgctgtggacccagaatacagatctcgcatcaaagctcaaatctgtggatgtgtgagagaccagaaccccggcgaatacagagtaagcccatacattggcccccaagcgtcgatacagttgttgatcagctggatcagctccgcgcggtcctgtctatccagggtcaactagagctgcaggcaatcccgttattagccacaagtcgttagtataataccgttatgagtcacgcagggtggaggtctgaaaacctttcgcatcatagccccgttcgcgaaacaccccgacgagcagagccttgctcagtacgacatcttgcttgatcctcaatttggccaagcgaaaaacacgtctatggggctttatcgcatcaaaacgaccagccgacatgcgtatgaggaagccctctccagaactagtacgtcgaaggagtgagtagcaagcgcatggcgtgagggctcagtggtgctctatgtcttgcctaacacagaactggcggccgaggaagcggatatcgcaatccctttcgacacgatattacattggcgtcagcctgattctacagccgtagaggacgatgtcatttcggagacatcgttcgcaaatctggcgattcacgtcccccttgcagagggcggtcctgaatggctaacgccagaagaaagcgagacgtcgcctttcttggccggagtaatgagaaagcagttactcgaggaaaaagtgctcaggactgggcgcatcacggttcggcaattcaggcaatgggtgtcggagggaagaagagtgataggcatgaacggtctgaggtgtgcttccatccgtccgagcatgtcagcatgagctgatatttggcaccctttcagaggcgtatgggaagccaacgtgctgtctttgtccaagtagaatacgatggtatatgacaagacgcacacgatcatctgagaccacgtgtcagtccttcatgctatgtatctaccagatgaaaggaatcatgatgttcctcttgggataggttttgccatgttccttgcggtaggtcttgtgtttcttcaatgcccactgcagcatctgtcccacggacaccgctgtgaataaagcgactgtcaaagcgttcaccatcagcgtgctgcatgagcgcacaatgtgatcatgatgatgatacgcacaacttccatcgcacgtcattgccgtcaaggcgatccaagtcagagattcaaaccagtagttggcgcaagtgacttggttgaaaccgtatcctttggggaagtttctaggttgaccaggaggagtcctaatcgaacgaagatttaagtgggtaaggtagtttgagaattctccgtactagtgatacgaacgtcaggtcagtctggcgatcgggaatcaacgcaagctacagtatgggaggactcacgagccagagcagagtccacgatccgatccagatgggattgtcgaagatggttcccctaagtgcggccgctccgtactgtggtcggaagaaggaagcggcggtcatcactccgcataacaaccaatagtgactgcagctgtggcagcaaagttgaatcgtaggataagccgagctcgggacagatcgatgtatgcgcttccaagcttacttcttgaagatgttacggaagggcatcgttgcgtgagagaatttgtgaacaaagacagtctcgtattcacgcttgatgtagtgaagaatgatcagagcgaggaccgttctggttaggcgcagatggatccaggttaattcattgcagagagatctcttggggcgcaggaacaggcgacatacttttgcagggtcgaaggttcgtaggcgggagtagattcgaggaaagagagtccggccttgcgcagggccccgtaaagcgtgtgaccttttgtggacaattggtagaggaggggttgaatgacgatgggaccgaactggtgccgatccaagcaaattcagcgtcatagtcctaatttctcaggtgatttcctgtacgtacgtattcggccaagaataccgtcctccaggcgatctgaggtccgaggtctttgcatctgatctcaatgccagactccttgattccgtacttggccagtgcatgggtatcttcggacaagactgtcggtctcgctttcgagtcggcaatatcttgaagactaagtcgctgtcttacttcagagatctgttgtgcatccctttcgactttcagttgttgcaggtctaaatcggggagacagggacagataccttgatacccttgacacgaatggcctttttcaagtcgagcacggtgacttgttcggcggtctttccggtaaactccacctgagtcgctggctttcccggagccttgatggtgacagtaaccatgataagatgtattgattctagaggtggttcacaagctcgcgaatctatcgaaagctttatgaacaggaggcctctccttcatctgattttgcgacttgatgcatgcccgatgatctcgcccatgatctctaatccacagcgatacccggtccccttctgacgcgcgaaaatgtcagtcagacttacacttttctccagaaattcccttgcagcatgcagtcgagtctagtggtaggtagctacctagtggggaacttgcttgaacacattcaccaggtttgctagatttgtaaagttaccgactgtgatagaggccatcattaccaagcctgactgcagcttcacgaattcgattacgagagccggatcgaggatagtcgatatagttggccatgaggagacagctcgttgcgaagcttgtagctcgcagaagccctaggctagttgcaagaccaggtctgccgctcgtaagcttgacctcatacatgtcattcctgccgcaacctaatagtcatctgcttctccagaccacgtcccaagtgacatcttctccatatgtcagtctttcgtacgctcttccggaccgaatatgcaagcgcaactatgcagacggagctgcggtcccgagcgggatacagcgacctatattctcacaaaaggacgactcgggcgcaggactcgaggcagaccgaaaacagatacatgccatcctcttcccttctataccgactcacctgatacctgggccaattaaaaatgcgaatctcgattcgcctcaggctgtaggactatctcccgaggaagtcttgcagacggtttctgtcttggtcaaggcgctggaaacggtggacaagacgacgacggcgcatgacgtgcaggaagacagaacatcagtccttccggaaaatttgaaagatgtcgaaggatcacaggccggcgatacggtcaatgacgaaacgaacctcagtggtggcccatccgatgtccgaccgagcaatgccccggtcggcaagcacaaaaaagcatcacctttccgcccaagtaaacgtctgaacaccaaattgtcggctcattatgccgaactcaccaataccatcggaccctatgtgccgcatatcggcaatgcgctcggattgttcattcgggaagcgagtcaggacgttctagaagcgaacgaggctgacctggaaaaggtctccagatggtgctttgtgcactcgttcgacggttcgcacgtgcaaggtcgttctaatcagagtctacgcgatttccacattgcgggtaaagaacgaggtcaggaggcagggtcgagtgcgccgactaagtcaggatcggcgtcagctctcgctgcggaaaaggccaatctagttcgacgtgctcagtcggcatatgagcagctgttgtcgagatgggcgaagcgagctatcgccgaccgcgcctcgtctcctgaagcgggagcgaagagggcagagaggatcttgcaatcgatcgaggaaacgttccagagtgtcggcagacaactggctctcatccatggcgagggaattgaaggtcatattgctattcatcaaaagacccggaatctgctcgccggggcttttaaggaacggattcgtgcgcctatgcgagagatcctggcgctttggaccaaagtgtcggtcgagttcgggtccaaaggcgctccgctgagagacgtgttgccacaggagactatcaccctgggcctcctgaagctaatccgaggtgtgtacccggatcaaagccggatttggatcgaggcagtaggtcgctccaaggttccagcaacaggcgagacggaccagccgacggcgttagaggacaagaaagacgcagcggtcatgcaagcatataccgagcggttggccaacgccgcgtacatgcgttctcaaagctatctgcgaagcattgtccggtccgctgcttctcgctcagatatggatctggtcttatcactgtggcagatgacgaaaaagcatttggagcaaaataatctggcggagtgtaacgaccgcctcgagacgttgtgcgcgttcttgcaggtgttgcttcgcacgatgtcattcgcacagcacgctccagaggtgaaacaggctgtcggcgaaatctttggattgttcccgaaccctacaccgttaccgatataccacactctcttgagtgtgtatggagcgaggttcgcagttgcgatggcgaagaatctgcccggcggttcaactcgcggagataccaatgcgatgcaccaaaacttgaaggtgacatggaacaggatgaaaaccgagggtgtggcgcgagatctcgaggcgtaccggctggctgtgactggtttcggaactcacggcgatttcgacggcgtgagggcctgctggcaggagctccattcggaccaagactgtcgtcgcttgtggatgcgacaatctggtggtaagccaagctcgttcgagtagcccggatcgcagactgacctttgcgctcgaacagcttcgtcgcgggatccgttcccgcctatcgaaatgttgaacgtgttcatcaccacgttcttgaatagccccaaggcttccggtgccgccgacaccgccctgggtatgtttgcaagaatttgcgacccaaagacgccctacaagcccgatatcgttacggtaaatattatgctcaagcattacgtcgcaaccaacgacatcgaatctatgtctgctctaatggccaaattgtcaagcctgggtctgaaacccgatgtggtgacttacaccaccatcgtcgacggattgttgaagagcggtaaacgggatgtagccaaggacacgcttgatttgatgcaatccaccggagtggtaccgagcacccatacttatggcctgctcattggtgatctcgctaggagcggtaccaaggacgacatggcgcgggcggatgccctggtcaaaaggatgcgattggcaaagctgaccccatcaaccgttacctataccgcattgctcggcggctactttcgcgccaacatgatcccccaagccctcacagtgctcaagcagatggaacgggacggaaccgacatggatatcgtgacctacaacatggtactgcgttccatcgtcaacagcaatgtcgacagtcatgcggccagaaaagcagtcaagagggtcggcggcaacgggaacgccgatccatccgggttctggcggacgattattgatgcgatgctggctcgtagaatagctccgaatgatgacacttggttcatcgctctctccgggctgcaccggtcagggagattcgaagaaggcgaccgggtcatcgaggaaatgcagcggcaacgcttcagacctctgccgggctcatcacttgatcggtccattgaggctattcgacagaggcagcccgccaggccagctagattccgatgatgtattgcgtacatgtaaatgaccaaatacaaattgtgatccgcacggataggaggtctgacaagggagacattaagggatgtccttgcggtgttcatgatgtaggagtacgtgatctcgagtgcccgtagatgtgtgatgcagtatctgctgctaccgtcggtttccatcatgccaaccctaaaaacttccttccgagccccacttgatgatacctctcgtaggctgcgcacgaatagtaatattcagctccagtgttcgtaatgtgacgtccgtacacgaactcaccccagtaactccaccttctgcccatccatttaccgaagaacggcaccagcacgatggagaagagcatctgcatctgtcgaagcgagtcctcccattcctctcggatcaatgcacgttctctctcgtcgtcgtcgtcgtcactgtattcgctcgagacgtcggacatcgattccgaaccagagatgcttgacggaaatgagggatacgattcgttcgatggggtggacgaaggaccagagttggattgcgggaaggagatgggcatgacgcaggatatcaaagggtctgtttcgagctgatgaataggtctagtcctgatggctgtgatgacgaactcggctggtatactactgtatacccataagaaagtcatttgtctggctggaagcgaggtgctaattaacgatcctggtcgagggggaatcgaatccgcggaagcaaatcgaagctgagcgtcatcatgtcgctcagagctgacgtcttcagagcgatgcacatacggcttctcgtagtggctctaagtcacaacagcgctgatcagtgccaccgcctagccaaagcagaccaccgatgggtccgagcgatatggacaccgtattctccctcaaaaaagctttgcgaaaggctacgaccgcgaccctgaagcagctggatcaggcgcatgttcaacaacaatgtgaatctcaggggcttgttatcgacaatcaccctacggctgacgacacgaatctctagctcaggctgtcagacaacttcttcgggaaaaggatgtgttgaagaatgctcgcggagtctcgtgctacctttccatggagaatggagagttgtcgacatctgggatagtgcaggacatcctttcggccagtaagtgtgagggtgctcgacctaagattcaaggctgatcgcgtccgaatgtcagacatccctctctacgtccctgtcattccttcgcctcggcccaaagcagcaggcgcggatcaatacgcacctccacctccggaacaggatatgcgaatgctgagactctactgcattgaagactttgaacgatgtcctcgcgacaagtggggcattcccgatgcgggacatagtcgcttggatcgtcaagaggaagcttcggataataggcggcaagacggtgcgcatcgagacgacctacacagcttacctttgagctgacgcctcgagttttatagcggaagacaacggggccatgccgctcgacgtaatcctggtcccgggggtcgctttcgaccggggatgtggtagagtgatttacagcctgtgctcgacttgcagtgccaaggctgatccaaatgttgatccaggttggacacggtaaagggtactatgatcggtacattcagcgatatcgcgagcacgcagcgagtagaggcgagaatcctcctctattgggtaagctttcctcgcagccacttaatggtacataacatatatgcggatgtcttaccgaggccgcatttctagtcgctctggcgctcaaggaacaaatcgcaactgagggagtgccccgaacggaaaatgatgaattggtcgacatggtaatctgcccagacaaggtgatcaaccgcgcagtaacatagatacaaatcagacaagtgaactacccagacataaaacgtataccattgatggccggactggaccatatgtgctaagcaacaagtttcttgcgcagtgcggtctttccggaagtcaatcctgcgatcttgtcccgcgtcaccttgagagactcgacggcggtacagcacgatctgctcaagttttgcaacagaacggcttctttgcgtctgtgctcttgaccctcctcgaaccagattccataaatctccagactagaggaaatgtcggtcagtatatgtatggtctggccttgaatacagataccgaccatctatcggtgtaatctctcacgcttccctccgtatccgcgatcagttcttgctggcacttcttcgcttgtatcggagcctcggcagactctgcagcgaaattgtcccatacactctgtcacggtgcgctcaacgtaagcgcaaggcatacttcgatatcgctgccctcctggagaagatctgacctggttgatcctactcatcaactgataaagagagagacgctccttagctcattgatgtattttagaatgtacatgaatcgcacactgacatttcttacggtgccgagagcatcgttctcatccacgaggaaaggctgcaatcccaccgagacctttcgctttttcgctatgtgttcagtcagagttgcttcgttctcgaaatcatgcgaaacgttgacggcgagagccgccatggagtccttggtcgatattttgcgcttcgcctgctctctccgtcgttctttgcgatgttgtggtctgatcaacatcgaaaggtttgcactagaggactcgccaccgctcaccaatatctgccaatatcagctgctggttcagtgactctatggctggttcctcttcgtcgctctgatctgtgatgggagtagcgggagacataagggagaatgatttgagagaattctgacgattgctatctgagtctccgaccaggcgacccaaggatcggattttcttgaaacccgttttacttttggatggagtttcataatctgataatttgatcgattgaggactatcggagacagcaccgatcgctgagttcctgcctcgtggtcccagtctcgtcgctgacctctcctatttgataaacgtgtatctcaggtcaacatgtgtccagtgcatgacgacgcggggtactcggcacatgatatggtacttgccctgttgataacatcgttgtcctgtctgcaggcaggaatcggcaccggatgcggttcgtctgtcatggctgtaatggaagagtgtctcgcaggagcgctccgatccaggaaaacgtcgtcaatctcatcaagctgctcatgttgagggcctccgctaatgttcgagagccggtcgtcaacactacgatcggaagctccattgggggcgtctcgtccttccgggatcttctcgatgactgtcggagtcatctgaaccattgccctgcgttggacgtcgttcttaggagtgctagtctgtcccgcttccatttggaaaagctcttcgtcctgtgttttgggtcagcttcgcttgatatatggccgtcctttatctcttaccattttctctactggtggctcgctagatttagaacgcgttctggacttcgtcttgctacaggtgtccttgtgatcagaaatcgttttgactggttgttttatcgcttccttggcctttctgcgaggagtggaggagatggacggaccggttgccagattcgtagggctcctatgaggttttttgccatctgcgtcaaatgccgcagtcatttcttagttaatcgactggtcatttgttggagatgcttacacgttctcggcgctttctttacagggctggattggaaatccggcgaactttctctagcttgaacgacaccggcgacaggatctcgggcatccgggattacagaagactcctcgatgttttccggcaaagactccgcggcggttggaatctccggtgcctgtttcaggggtggtaagtttggacgatcgcgctcgccctgttcttggcgcgggctgacacaggcagccgttgcctttgtgcttacgtatggccccgattgacgtgtcttggtgcggccagaagcctgattcaagatttaggggtcactctattataacatgctgacactactgatcgtaaatgactcactttggtcgatgactgtttgttcgtgcgtgaacgagtccgccggccgaccgaagaacctacattctcgagggtatcttccacctgatctgcagctggggggcctgcgtctacttcgtcggcagtggccggcggtgaagggttctcctccacaagaatcggcagatcacctagttgggacggatcatgagattagatcgagttgccaccattccgacgaagctaatagccgtgtccttcacctatcgcgttctttggatcgtcaggataggcatcactggttggtagcttgcctttgctcagcagattagcaacttccttgccagtagaaactctttgtggaccttttgcagccgatgcgtcaacctgtttttggcggtcaactcgtctctcaagcaatcgtccacgaattctcacgcacgattttgaccttcgcaattttaagctgctcaaccaagagatcgagatttgacgatttgagatagaatgttgtagccggtagttgttttgtctcggacatagtcttatctagttcagacgttgcgacagcgaatctcaaacttccctcttcatcggtaatcgttagtgaggcaatgaagttgcgatagctacgcaacttacgggtgtgcgtgatagacatgtcacataatatccaattgttctttgcgtaggccctgtattgattgtctcttttttgctggccccaaacatgaatatcttcgcctgcccagtgcatatgatcttcttggaccagaacgataatcgttgctgcacccagcatgaccctgccattgtatgcgactttgtccacaatgtgggcttgacacctgtagagtcataagcattttgaataattgaccgagactcgcaacttgcttgtattcatcggcgcaacagttaaatgcctggacgagatgagactggattgtaaattgggcaaagtcgatcagcatgtcttgtatcagtgcctttcacatgccgtcccaacctcttgcactccttctccaggctgcttgaccaaaagcgctcgtcgtagcgagtcgagagagtccttctcgagctgaatctggcccaggaaggaatccacagcattcgctctctttgtgctgtcgttacttgcctcgtcaacagtctggaagcaagccattgccagagccagagtctggtatcggcaagtgggatctgtgcacggatggatggggcaattcaagacgcgcgcctatgaactccgtgacatcgacttacccttggtctcccggaagattgttcccagagcgtctctttattcgaaatgtcagctccgcaacctgtcgaatctaagcaggcagactcacatgggcagatctttaaatactctcttgttccgattctgacccttctgggtcaccacatagagtaggtgaatagcctacaggcagatgagtgttctggaagcttgacctgttacacaggcaacaaggatacacttactgatgccaccatcccagaagcctcaacaaaagcgcccttggccttgactatgtctatcgcaactggtgtcatatccgagctgatcccagcgatttctgtcgcggaatatcagacaatattcggccgattgatgtagagtcctcacctggagcatcatcggtattcatgatcttggtctacaccagatcccatacactcagtcgggtcgatctcccagctggtctcacggccaaactcacagcaagcctgaaagcatggtgagcaactgtctatgagtacatcgcaccccatcttgaaagcgagacccaccaaaaggcagtcttctcaacaacctccgcccaatgtatcagctcctgagagagtcttccggacaatgaatgactacaaatcggtacggattctttcaatatttttttgatcacgtcgagttctgcctggatgagacgagtgtgcagattctgtacgaagatcgcggcagatgtgagacacgccagggatgccttgctaattattttcggtggtcctcactctatcgagataggcgatcaactgccgggtaccctcgattatctcatttcgattgtcgtgcacctgcgtgatgaggaatttgaataagggtcagtaatgtcttttatcagccgacgatttcacgtactaatgacttgacgattttcttcaaagcttcgtaacgactggcctcctccccgagtacagccttggcttcgaccttaaagtcattgagtttcctactgatcaacttgcgagacggttccggcaacatcgtatgtgctgccaatcctcttggattaccgctcagtacagactttgccaggtggccccgtgaagagctctttaaacgctgtattttcccgatggcggttaacctatcgtcccccctgatcgtaacttcagtccaacgaggatataagagatggtatatagatgtatagatcgaacgatcggagacaggatcacgcaactgaatcgacctgatccataccgcgagccgcggaagcagagccagcgccaaaggatgtttcagtcgtcgagttcgaatcaggctgacatctttctcaacgacccgaagagccgtcagttacccatccccaatcgtctggtcaacctctacaagaagggcatcatcgataccaaaaactcgcatgatagcgaggcagcctgatatttgagcatggtctactcgagaagagacatgtcggaccatccagccagttctgggtatcttcctcgcaatagtcgctcggaccgaggtccgggtagagcaacagacgtaacgggtatacccgtgattatgaagagacgacatagatagacgacatgatagaaggtaagacgagtagttatgggaggcgatgcgactgatgacttgattgagaccgaagatcacacgaaaccgctgccgcccctctttgcatcgatcttcgcaaagcgtacttcaagcttcctctcgttgatgatgcagactgttgcgaggaataaagcaccaacgattcctacgaatccatatatggaactacaccgataatacgattagcgatctggccaacggttacacaccttacgttcttcctccacaataggctcacgtgaagacgttttcgagcgtataatccgtgcgggcattgatctcgtcgatacaccccttctgttgggatgcgaattccgtgtcggcacaaaatccaagagccgtcatgaacaggccttctgtagtagcgttgctgagagacgaatccggtaagtgaaccggtttcgcccaatcgcggtcgagccttactaatatccgcagcaggaaaactgcaagccgtagcaaggtcacataaaggtatgagcaaaactgacatatagtacagtatactcccgttcttctcctcttaccctgtcttgaagatgagcttgctcgtcggaagtctgcttcatccagatcttggcaaagtggttcctctgtctcaacgagacgaaccaaatgctggtcccgacctaataacggcagaagacaggtacacctgagcatctcggagcaggctcgagcataggggacacatgcacttacagctgtggcgatgcatgcattgagaaccagtgtccagttgaaagcgatgagcagcttattccggttgacgggcctcgtaactgcaacgatcgacaggagaaagctcgccagcaagcatgcacctgtgaatgtaccaactatgttcgggatagcagtagtcatctaagtatcgcggcgagcatgcggttgatgatttatgtactgacttttctcgtcgtgtttagtcaccgccatggagatcaaaagatcttctcccttggaaacgatcgctgcataaccgatggagatgataccggcagccaggaggcacagatttaagagccaccagacgaacttcaattcattcacgagttggagcattccgaggctgtgatgtatctccaagagaacagttttgatcgcggttattgaaagggccgtcgtccgtctgtagtgatctcagaccctcaggcttccttcgctcttgcttaagagtgtagtccgttcatgcagttcatcctggcgaggttcctagtggatactctatatcaaacacgaatgtgggctgtgatgtcaggcattgagagatacctggatcaagcagaggtagattgatcgactgatcatgatggcagcactcaaaagcagaatgcgacgaagaaagggaacgctctacgcgagcccgattccggacttgcccgagcgccggacgcgaactttgaacaggcgggcatgattgattgatcaattggacccggagcggaaaacaatcgctgtatcgcatctatggtctacattttgctggatcctgtaaagcggcatcactctggctcgagttgactgctgtatgctatgttcggttttcatgcacactgcgctcccagaagctctgcgagcttcctggaccgcttcatcacctctcctcttgcacccatcacggtgagacgcaagctaacgcctttgaggtcctccagcgtatcgagacttttcagtggtgtcaattcgaaccttccgaatgcccagttcagtgcatatacatgaacagatgagtctcccgggtcctgcagacgcaggaagcctttgactagtgttcatcataattgttaggcgcctggatgtcaaccttcaaagcgtaaatacccacctcggtaaatctcgaatggcagcttcttcagaccggcttccaggacctcgaggtcaaccggagcttcgtcaccatgggcatcagaccctgtgtcgtccatcccgccgtcacagtcgcacttgtcgcccttatcgtggtgatgagcatggccgtccccctcagctagccgtttcttccccttccctggctgcactccccctctccagatgcttctagtctcaatctcctccatgtgcgattccttctttccatctgctcccagtaattcccagtctgccgtctcgtcgctacctcgctcgaaaagcttggtgtctaggccgaatacgagttccggtttaagcggtgttgacttagaaacgcggatcattggggtctcgtcgttgagctcgtataggtggtccaacaccgaatcgagctcccgctctgacacgaggtcgtatttgttgagcaagaggacatctgtgtatttggcttgaatctgtcatatccagtctctaggggattagccaaagtgaaccaaatgcaagcgcatacgcatgcacttacctttgctgtaggactcgaatcctcgtaacctttgaaattcacacagtcgatgacggtagccacggagtcgagcttgaagccctgaggagccaattcgcggaccttgattgccaatgtcgccgggaatgcggagccacttttgcgtcaagatgcaggttgagtatcgatgcagcgttgaagacacgttcaactgtcgagctcacctgctctcgatgatgatacgatcgggattcattttatctgcagaccataaatggtgtatcttctggtcttgtggatcgaaaaggaagtaaatgtcactcacccttgatttccagcatggcattctgaatctggccgaccagtgtacctgcagcggaccggatccgacttcagtaagctccgaagtggtacccttccttgtagtcactcacagcatctatcggtacggatcgtatcaacctctcgaatgcgctgggaaacaccccggtaggttaggcttacagacagccattcaggatttcactgactcccgcgatggatgactcctttgcaatcagagaatcgaccctgtcggcccgatagaactcggtcagcacgtacggtacgtcgtttgtgtacttgcggtggctcactcgacgtcgccatattcgttcttgagcaaaactaccctgtagtccttcggcagctcgccaagtaatccgagaatggtggaggttttaccctgatcgttgcgcaaattagattacgatggcatagtaccgactatggctaattgctatgaatgcggtactcacggcaccctgtgcgatttcaagccagacgtcagcttgagattgacatttcgtatcactctgtacctagacttgcgaggaatcccgtgaaacaggtcaccggaatagcatctttcagggcgattcggtcttcgctagtgtccgtcatcgcgtgaggagtttttctaatggctattaccgaggggcgacgagggttgtctacggcgatggtttctcgaatcgcttccaaatgtctgaaatgtcaaccaacaacagagtgagttctaccctgattgtcggtcaacctccacttcagcgatcatcgatcagcgaggctccgaggctcctaagcaaacgcgtgagaaagcgttacacgcgatctgacgcggctccagccaggcttgcgacgactaacctctcttcccctggcagtcggtcaaaggacctgatcgttgcccattgaccattctcttccttcatacgtcaaaatgaagatagctttcttcatctcgtttcttgcactcgagccacatccaaactaccttacaacaactcctatcaagatgtctgacgatcgaatggcccctccccctggtggacgacgagtctacttgggtcgtctccctcctggtcagttaacggggacgcaacgatgtgcactggcctttcgttaacgcctgaaaatgaaatcctcctctacagatgtccagaagggcgatatcgaagacgtgagttcgaaaacaaatgggtatgacacccctgttacacccttctgatcgcgtcgccgtaccagttcttcgcccctatcaagttcaccgactgccgtgtcatgggccactttggtttcgtcgagttcggcacccccgaggtgcgtagtatcgacgcggttgagcactgaggactactcgacaactcaagagtttcttaccatctttaggaggccgatgatgccgttgcccacaacgcccgcaagcccatgctcggagccgagtgagtcgcgtctacatccttcgcgaagatcaaccgccttacatgtcccgttcttagcatcatcgtcgagaaggctaaggagaacgctcgtccccgacgagagcccggtggcttcgactcttacggtggagggtaggtgaagcgaaaatgggtattacgggacggtagattgacccgctccacccgtgtctcttctgcgcagtcctcctcctccccgacgaggacccgctcctggccgaggtgtccgtctcaccatccgtggattgagccaagatgtcagctggcaggtgagtgatcgagctttcgaaaacacgttgaagacctgtcgcactgacttgctctgtttgggtcttgggtctgcaggacctcaaggacttcggtcgtgagggtggtgccgtcatctttgccgacgtcaaccgcgccggagaggggtaagtcggacgcacacttgattagaggtaggcgatgctgagtaaatatccacacgctgtatagagttctcgagtacgctagcttgggcgaggccgagcaggccatggaccgtctctccactcagaccatccgtggaggcaaggttgacatagtcattgatgacgtgagtttcgtcgcgcattgcctcgctcatcattgacgcgtaactgacatgcctcgtcgtctcaccagtcgcctcctcctcctcgaggcggacctcctccccgagactacgagcgtggtggcggtggttacgaccgcggcttcgaccgtggcggtgaccgcggtggctacggtggccgggacagctacagggaccgtcgatcccctcctccccgtcgagaatacggtggaaggtacgacgaccgagagcgtgaccgtgactaccgtgaccgctctcctcgacgggatcgggacaggtcgccccctccccgatccagggactacggccgggacgaccgacgaagcccccctcctccttctagggagagggacgtgcctcctcccaggcgtggcgatgaccgcgagtaagtgtaaaactcctcgaacgacctggacactggccggctacgtggtcgccatccaggatcgcacgtggatttctttccgtcccgtttgaactgtctctcatcgtttcgctgcgcctaccccctcttctctggccgccttcgccctcgcttcgcactttctttctctgcagccaccgatactagacaacctttactcggccgactcttcatcccccggatgctaggacaggacgcactaggaccaggatggaagggcgcgacggaatgtgatgaaccggatcggatcgggatcgggcaaggacgtggaaattttctggacaaaaaaaagccttctccttatgttcttctcctactatgtggccctttggcgctctttctctggaatacatgcctcggatttatggtctcttctaactttcgagagtcgacccgacgtcgctggcatatttcaaggggtcggaaggtggaccagaggacgcggtgtcgattgaaggtgcactccactatcgaggaggtacaggctcgatataaaccccttctcgacggcacccttcgttatgaggacggtagtggagactgcactacactgacatgcggatccggtgcgttggtccatcatgcgaatcgttttgagaagcatcaggcgattcccgctgcgcaggattggaccggaggcaaatcgaccctaatctcattttgctgtgcacttcggctttggactgcagcctgggagcgtcccggttggcactttcagcgtcctccagagatccatgactcgccacctagggacctctatttggcatagaaattgttcatcggtcccgatatcggtccattgccgtcaataataatcgctgtccggcaaatctttgcccgtccccgggctccgactatgcaaaatgggtgagtgactttcggaccagtctgtcttctttctttctaagcaagtggttaccttgtacttgtcgatgtgttttgcggatccctatgtatacttgtccgcgttctcaccatctgagcatcgataccatgcattacgaggttgctcaatcgagctgcaacgtccgggctatgtcgaaatttgtcatgagtaagactttcggatgcggggacgcgagtttcatcgcccgaggccgaagctgtgcaaccgatcaaccgcgtcgtgacggctggtcgcaggctcaagagatcaagagatgcacaagtaagaaggaaaacaatctttgacatgaccatcttctccgcattccccctcctttgttattctccccgtagcctctccggaaaccactcatctcgccagcgagtccccctttccccttttcgagcgttacataggatacattatagctatagcaaccggactgcagctctctcggaactaaacgacaactacctatcgttacaatcagctcgagaaaccttttcctttcctttcctccactacacaaagccgacgacctgcagaaggcatatctactcatcggatcgcttcggtgattagctgattttcagctagttagtaatagccctcgccacgatcgctaaaccacacctgaatcgaacacctcacgccgcatcacccacctacggtatgtcaaaaatagcttgacaagtctgatcgccgcccctggctttatctaatctacctcatgccggccgaattctagatgaaccatcaaagttcggctatgtcgacatccaactctcaaaccccttcgaattcatcggctgcacctttcacctatcctccctctcaagccccacctatccccagctccctcttgcccggtcaagcatccatctcggctcctccgcagaataatcctcctccgtttcgccggccatctcaagtcgagaagagcaacctcaatctgcctcgaagaagccccagtatgagtgcccgtgctcagcgggagatgatgaagcgggagacgtatcacgaacaacaaggatctcgtgtggacgctctgcatgacggacgtcaagagcaagacaggcagcaccagcccatgcaaagtgttgactctggatatggctcttcaagcaagtcggaagattacgaagattcgaggatgtactcgctcgatattaatcgcaatgccgtacaaagacctgtccgtcctactcgcccgggagaccatatttcgaacatgtcttatggcgcgggtcacatgcagcaacagccatacgacacgcatcattatcaaccttacacgcaaggcggtcatgccgaacagggacacccgcaaccgctggcgaagcggctcagccagagtctcggaaagaggctttcgatggcttcatttcgaggtgaagctgcaccactgaccgaggccgacgaaaagaggctcgaagaggagaagatgctcaaagcggaagaagagcgccagctagatgaagaagagaaggagatgctcaaacgaggcctgttcaactggagcgagttgaagagctggaggttctggattcgaaaggaatggtggagtgcatatacgacctgatgaagtctgattgtgcagatcggaattgctgacgagggtgtattgttacgacgggacggcagaatggtacatcattctggctatttgcgccgtcgtggctgctctcttcaccatctatcacgatcagattgttaaatggctcacgccttatgctcagaagctgaaagagtcagtcgcagtcatggctattgcatggaacctgattgctgatcttccgtcggcgtagattacctggaggctgggctatccccattggagtgatctttgtcgtctcttttcctcccttgttcggaggcgaagttgtctgccttctgtgcggtctggtctggggactgtggatcggtttcgctattgtttgcgcaggaacctttttgggagaagtaagttgcaacttgagacgtggctcttcctatcgaccgcaacactgacgaggatgatgcaccttcctcagatgggcaactttttcctcttcaaatacacgctgcgaggctatgcagccaagcttgagaggaaaaatctcaactacgcacttatggcacatgtcatccgtgaaggaggtttcaaagttggtaagtactcgttgtcgaggcgagatatgctttacagctaacgatttcggcccattatcacagctatgatcggtatgttgcaacatcggagccgtctgggtttgagtcgttgctgaaccagtgtcgcttggcgtcccgcagctcgattcagtgccattcctggtcatttcttgacagcaatcttctccacctgcggcatgtccgtgatatcattcgctttaggaaccgctctatcgcttcccaaacagtgagcattattctctgattcagataatgccggatgacgcttagatcgatcgtccagacttgcgatagtgtatctcggtgtcttgattggagcgcaggatcaatcgagtaaagacaagatcgtctcttataccgtgctggcggtgggcgccattgtgactctcggggcaatgtggtacatctacgcgaaaatgaataaggcaaagatgccggtctggcgcgctcgaaggtgaggattaacccagtccgtactttctatcgagtccagctgacccacagtaacatgacagagcggcattggccgataagggagtggatctcagtaccctgccgaaagagcccccaatggaggacgggatgcgcaatgtctcccgaccggctctcctagctaccacctcgctcgatgagaccacggatccgatattgtacaacgcccaggctcccgctggcagtcccctcgacaggacctactcgacaccttacgacaagtctggctatagccgtggggcgatggcatcccagtcgtcgatcgacgtcaccggccgcgaagtagatatgggatcaatcgcgatgcaagacctgcctacaggccggactcacagccgggcacctaatgttcaattccctgaacccaagccatacgtgccagccatgggtcgacaagcctccagcgcatcagcattcaccacagctatcccaccgccaggctatcttgatccgcctatgacccaatttcccgaaccacgatcgaaaccacccgcacagaccatgaccgctcgctcaagtgaggatttcggacccgaggttcctctgacgacaggaggaaatagcatggctcagcgcatatctttagtcgacaacggtccttctcgtatataagcgaagccttgctgttcgtttcgaaataccctactccctgacttttaccagtcaagatcatataccatgtgtcacagccggcagatgagactgttctgagcagcagtagacaaagcaaccgcgcttctgaggccgacgagacggattccgcgctaatcgaccgacgagcttctctgatctctagctagtctcgacagagcgacagccagcaattgacttggtgatacctatagcctgagtgctgcgacattcaccgtgtaggtctggtaaacagctacgatagagacggctaacgagcctataatatcttgaagagaccctccctgcctgcctcgctcaaaacggtcgatccgacacagctgcgcgatttgaggtgaatagcgagcctcgcaatgttgacaggaaactggcagcagatatgctgaactcgcggtaactttcaccgtcagaggaaacctcgagatgccattggatcttggctattcgtcgtccgagcaggacgatccgagatctggttcctcgatcaggcccttacaaacggtatcagcaagcgagcggtcagcgatctcagtgctcggcggagccgagcgaggaaagtctgaacatgcggggatacaatctcggaaaccctcaaatagctctctcgtatccgaatcaaaagctctccaaccaatcgctataaaggggatgtctcgccccagcgagggagacgggtcttctggcggaatgcagattgcgaatgtatattcgcagaaacggcttgaagtcgacttgacggtctcgattgaggatgcggcccctcgaaacggtgacccgcaccttagtaatacctcggggagaggtcgagagtcatcccgtggcagcatcaaagagcgtttacctggatcatcgccgtcggaagaaggggcccttgtgaacacgcctcaaccgatccacagaaacgggctggaaccgagctcctctttggagcggggcaaggacggagccgatcatgtctccattcaacccagtacaaagagggaccgacggagatctcgagaagaaccctggcagtccccagcgagattagatcgagatcgttctccgccacgaaaggagtcgaagaaacggtcacagcgctccgacgacgagtccgacagttacgctcggccatcaaaagaacgcaaagccttcgtcaggagccctccgcgagagacttcaaatcgggagacaggctcgaggactgtgattagcagcagagcttacactgaaaacacggctgaccgaccggaacaacgcagctctcgtcgtttgccggaggacgatcgggagcgggaacttcaccgttcatctcgcacgcgaaggaacgacgatgcgctggattacgacttcgacgaaggaggttcgcatgggaatcagtcgtacgaccggtattcgagagatagtcgaagagggagagcggactacgatgactatcgaggtagcgggcgagatcgttacgataattatgactatcgcgacgatcgagatagtaggtatcgacacgacaggtacagaccggatgaaaggtcgtctcatcgaagaagagattatgacgaccattatcgtgctggcagtaggagagactacggcgatgttagggatgcttcttttagggaggtcgaccacgcttatcgatcgcgggacatgcgcgacgatcgagacatggattacaaccgaactcgaggcattgctcgcgaaggagatcgtcgacccaaatcccctttgcctggccctgtcgtcgaacctcgggcccgatcaccaatcgcatggacacatgcccctcaacgcgaacatgtagcgaaacccaaccgcacacctactgaattggagcctcccgcgccgccaccttctttgcctcacgtaccgcctccacccccatccccacccttgctgaaacggaagtctccaccgccagactttgctgaagatgagcaaacaagagcaaacaagaggcccaaactctcgaggcaggagacttcggtctttgctgcacgtcaaccatcgattgagccgcttcaggagattcctccgccacctaaaggcgccgcaactcctgaccctcagctcgttgaaccccccgtcgagcctcccgtcccgacacccgttcccgagcggccgatcagaagcaaggatcgtgatgaagaactcagacaagagcggaaactcaaacgggacttgttcccagatcgctccagaatagggctgggacaagggaagaggctggattttgaccgtgaaagcaaaacgtacggcaaggcgtttgttggtctcggtcgtttggaaggctacaaagttagcaaaactaacgatggggctctaggaaggggaacttttgggtgagtgtttcgattccgtctattgacgtgcgcgttgattgtaacctttcccgtcttcgacagtactgtcactaaggcgacaaggatttctgatgggacgctggttgcattgaagctcctgcaaaatccgcagcagacacaacagaaaagcgggtcgcctcgaaaggacggggtcagtgcagccacatgagcagtccagaacgggaagaccatagagactgaattgattcgaggctgcttccgacctcagatgctaacaacgactgcgagggagatcaagaacctgaagatgttgaatcacgagaacatcgtgcctttgctggagatgatcgtcgagcgcaaagcaggtcagtcccgttgtccagatgtacacgtaagggctggacctgagtttctagttttaattcatgttcaggcgaatccgaggccaatatcttcctggtctttccgtacatggaacacgacctttgcgggtatattcattcaacagagtcgaccttgactgtgcagaacttgaaggtgtttgctgcgcaaatgctcgacggcttggccgagatgcacagggtgagcaatagcttacaagtgcgaagagagaatgtcagacgctcaatataaagcaatatctgtctcatagaacaagatcgtccatcgtgatctcaagacagccaatattctgatcaacaaccggggtctgcttcaaatcgccgatttcggtctgtctcgtgccttgtcctcggatcggccgtcattcacttcggatgacgcgcattataccaacatggtggtcacgcgttggtaccgagcaccagaactcttggtgggcgagacgatgtacggaccagcagtcgacatgtggagtatagggtgagccctgaatctgcttatgactaccgggatcctgctgagaaagccctcgactataggtgcattcttgccgaaatgtttactggcaaggtttttatcatgggaaaatcgaactcccatcagctattgcgaattttccatctcattggtccacccaggaatggcacttgggagcggttcgatgctattctgcagtacaacgacgtgcaagaagacgacccgagctttgcgcgcaaaagcatcaaggttcaggaaattatggctacagcagtagactcgtatcacggccttcgcaataccgacgcaagcagctggaatccgtgagtcgcgattacagtgatctcgccggcaaattattgatctgagcctcttgacatgtctttgatcagatttagagccgagagggagttggaggcgctgatacgctccttgttggagctgaacccggccaagaggccgacggcgctcgatgcgcgctccaaccagttcttccaatcgtcactgggctattctcgagacatgtaagtatcgcgccggcgctaaaagtcatgttcagggacctttcgttgacgttctcggcccacaggattgcacctctcaagcaagactcgagggaaagcggatcgatggctcgcaatgcgatgagcaaacaaatgcgcgatgatatttccgttgacccgttccactttcctggagcggtgccggcgccggtttactccaacatgggtcagaacgccgcgtcttatcaagccatggccaacacgatgcaatctgcaaacgtcgcagccaacatgtttgccgccaaccctactgccatgatgcaaggaggtggcatgggaaaccctccgatgatggctcggcaaaacctgttgaatatttcgggcatggcttcagcaccgatcgcgcaattgcctggtggcaatcggttcaacagcaatgtttcgaatcattcgacacccaacagggctcctcagatgtcattcaacccttcgcgtggcccaccacaacctggacctgggaacggtctcccttacagcaatatgggcccccaaggccagtaccaccaaggtcccccgggccgaccaggcggaccttcgggctacggccagccgtcttttgtcccaaacaacccgaggccatcctttgctgcccccgtgagacagctacccaattctggaatgttaccctcgcgaccagggttgaccaacggagccatgcatcaagcgccgaccgcagccatgcctggtcaacgtcctcgatagagcgggcttgttttgtatagatgcggggcagtagacaatgacatcaaatgatcaataatattcgaatgcattgcatgcgatattcgacaacagctacatgacgactcgtacatggactatcctactcgctctgacgggcgtgcgatcccgaaagatgcccctctgccgcacgtcgttgtcgactggcctttaacctgttcctcgcgagaagtgatgaaggcatctttcgaccgcgcatgaggctgatgacctgcctagcctgttctcgtcgtcccgtccggaaatgcatggcagccacggcgaggaacatgcgtgtgtttccgacccgactggtcgtcctggtaggttcctttcgagcccgtctttgtgggtccaccgcggccggcctagcgagtcctgattgatattcggcgagtatcatcatggcgcgatgagaatacccgagtcgagcatagtctgtcgcgactgccgtccaactgggtacgcctggggaaatccccctggcttcgagatcccggaggtacgcctcggtcttgtgaggtccggtccatttcgtcatggccatgatgaaggggatgtgactggtcgggttcagcgtcgtcgagaccggagtcgggtcgtcatgctggtcgaccttggatacggaatgaatgtatcgttcatgtagaccggcaaggagggtcccgtccggtcggtcgaggttggccaagatgacatgcatgatccccgtcaccgcgcggtcagagggatacaattttgacgtcgtgcgcacgctgccctttctgatagcgggtacagggtccgggactggttgaacgagtcggaggtctttgaggcgaggcagaccgatccagaggaattcccgcttgaacaacgcaatggcctcgccgagcctttgttgtcgttcgagtttccccacctgggccatgtgccagtatgaccgggtcgtctcggataccttccaaggcgcaagtcgtcgtggctccggaggcgaatcgatgaacctgtcccggatacgtttgagcagagattgacgatcgcctcgagcctcgagacggacgagcacgtcggccagcgccttgataggtccgttcgctcgagcgtgaatgacctggagtacctgtttacccgcgagcgtggtccgatcggtggtctcgtgctgcgggccgcccactttactctcacgtttcatgaccgacgccgtcaagtagcccacaggatccggatgatcctgttgtacggcgtgaggtttacgaacgcgtggctccacggcctgatcaggcgggtacgtcttgagcgcttggagcatggccaacttggtccgttcttcccagacgatgccgacccgttgacccgagacaaagatacgcttggcaaagtccaaatctcgtcgagcttcggccatgcgctcgacgacagcggggtcttgcggtgtggttgtattgaacaccgacgacgacgacgattcatctacggcccgttgcaatttccgcaccgtcgtcccgaccaacgacctcaggtggaaattccgcaatttgaacgctcccatcttcaaccccgctctcgacctgatctcggccttgttcatcgtccgtcgggccgtcccgcctgatctttcctcgctcacgagtgagatacctacggccgctgccgcacgctcgatcaagacgttgaccccacggtgaccccgctcgttgtccaccctcgccaaccaggtcttgaacagacccgtggcgagggacatgcctgtcaaccccttgctcgcgcagagcaacaagaggtgttcggtaaactgtaggtccgacgtgtgattgttctccagcgcggcgtagacgatcggtcgatacgcgtcgatgatgggtttagggatacggtagtgcgaggtgtcgacaggacaatgggagaggtacctcagggcgagcgagcgcgatctgacggaagggtggtccggatctgtcgtcgggatccacggggtcacgctggctctcaaagcgtggatggcgccccgggcgtacaccctatcggcgcgtatagggatccctagatcttcgagctcgcacaagagcttgtcggcgtcttcccagtgagccgtctggacagcttggaagaggacctcgcatggcgtcgtcacgatcccctgatgacgcttctccttgacttcggccagcgtgaccttggcagccgaggggaggtagacgaccggttctcggtgacgaggtggtagcgctgtcgaaggcattgacgacgatgggttggggttgaggactgtaccaaagtcgttctcggtatcatgaggcggtaacaaggtaggccaggggaccacgaacggcttgggttgtcgacgcgggagaatgacacggtggtactcgtcgtcctcgagctcgaggaattcgtccgtcgttgtggacgatggcgacgatcctgggacttggtcgtctccggtcgccttttcattcacccgcaccgctatttggtcgacccgacttatatcggcccccgtgcttgtcaaggtcgatacggtacgacattcccaaggtggtgcggtggacgacgaattggtaggcgtgggggtagacctgaaccgtcgacgcggaaaggcgaggacgagatgtctcacgccttgtctgacgtccattatcgtccagtttgcagcaatgttgctcccagtctccaagatcgggacggtgtgagagtttggcgggcgtcgatgatcgatggtgagtagtcaagtagtagtgtgagtagcgtaggagtgactgagtatctgtttgaattgaattgaattgttcgttaccttcttgttgcgtcggcctccacatccatccgaggtgatgatgccgtaaacacccaaggtgtcaattacgtagtctagccagctagtctactgataatatacacgtcgccccttctcttcttttaccttgtttcgccttaaaacctggtcgcgaccttgctttggctcagcttggtccaatgacgatctcgacagttcaacgtagctggtgatctactaactatagtcgagctagtcacattaaaccactcgcctactaccaccaaccagcccacatccgatccctacactccctcaacgatgaaccggacgatcatctcggccaggcccgtcgtcgccgcttcagccctgcgacaacaagcaaggaggacgttgatgaccagctcgtccgtcagggcgggtcacgacgctcatcacggtgccactgccgcccagccagaggatcccaacgtttacaccaaagagagtgagttggatttcgacattgataagccgctcgggtcggtcccagagatggaccgactggcaggctcggtgacggcaagacgacgacgacgagccccgtaactgatccaccctgaccatgaccttgacccgaatcccgccctacccgaccggctcaggcttcctcaactctacttggcgcaacaccttgatcatcgggaccatctcctacctcgcctacaccttcctccccacccctccctcctcgccctcgtcgccatctagcgacccagcgtacaaccgccctgccgattccctgccctacctctccaagatcctcgcccgctcgaccaccccagcggaggagtggaagaggagaaacgagaagcacctggaacagacggtgaggagcgccgaagataggttgttgttccaggaagccgagaggcccagggtgtacaggttgaagaaccccgcgtgagtcccccctctccacctccctcccaatcggtccctctgtttctcggtctcgtcggacgaatcactgataccccgatctcccgacgtccgacttccgacttgcggttcatcgtccgtagctactttgataccctccctcctcaccgtcgaccggtcggggacgatgtcaacctctctgacctggtcgtcaagaacgatccggccctcccagacgttcgacagtaggcaaccttttgcagcgggtcggagggcgagagatgaggatgagaatgaggatgaggatgaggagaggatgggatgggatggccggatgatgaaaatgacgacgaggacacggggtaggggatggatcgggatgatacccggggggacaggtgggcggaccgacaatgatcgccgctttcgctggacctccccgccatccttgacgatggactcgacgcggacatctccagacccaagacaaggcggatgggaggacaatcggggcagagcgatgtacggatgtgcatgtagagagactgtttcttcttcttcttctggactcgatacaaacgaatgatacgaccgggagcatgacgtgttgagtgagaccgattcgcaaaagatcgttcgtctcgaatcggaatcaatgaaatctgcatctaaagcgaggcgagccctgtccgataaaactcgatgtgccgcaagtcccgcacgtctccactcggtcatcctgaacgatccgacgaccgcgttcatcttcaatcgcacaggatctcccgagatgttacttgtcggaacggccaggaccagaacctgggcacaatctaacagacggttcggaatgggacgtgcatgaaacagtatcgccaaaagcggtaggattcactgttccaattgctttcgaacaatacccgctgaaacgctcaactcactggcgacgcagagcactatgcgggacccgagtattggaccttgacagcttctgcagcgccttccgtgatccggatgccatccctcggataaacgatctggatgtattacgagctttctctgcttgtctgggcgctcagaatgttgctactctgctcggacagtcgtgaccggttcacgacggatgctgtcctggtacgtcgcggggaaatattgagctggacagtttgatgcggccaagtcgccgtgcctcgatagaagctgtggttaaggaggcggcgcaatcataggcgcagctgccatctcgcgatggtcgatccatcgtcccactacggccaggccacaggcgcaggatggctagcatactcgacccaacttgtctctcgatatcgactagacgcagactcggactcctgctgattttgcgcatcacgtcgaggactctgtcggttccagtagatcgaggttgaagtgtccagtaccgtccgttgcgaaggatcacaactgcgacgcataagattaaatcccacagcagtctaccttgccgtgacttccaggatcccgccaccgctcagggagggatgagatggggtatttcggtaagtagacatcgaaagagacggtctccgtctactgacgcaggccgaatcgacttaggagtcctcactgatggttcggctcgcgttgctggtgagcaagggaacacgctctcacaggatcacgggtttcgccgaggtcatcagaattccacctcgggacgaccgctgactgattccaagatgatcagcgcgatgcttggcataatttgcggacgactacggcgatcgaagggatgactgctcgtccggaatgttgcatctgcacgacctctcgatgtccaagccacatgcattctgcctggccggctactcccgacagccagggtgcccatgcagcgtcacgcacgacccctatttctccgttgagggggtcgggtaacacagggtgcggagtgttcatatcgaggaatgtctgctgagcttctggtgtctagaatctcgtgcctcgtgtgaaccgacacgtacgggacatatccggagtgattcaagtatccaataacatggtgcacgtcgatgtttgcattgaggtgtgaagggggtctatcgccaagaacaagttgacgggattgatcgggatcgatcaaccccgggccgctagcaaccgtacacgccgctcttacgctctacgcagcagaattaaagttccgtgattgtaccttgcgcctcacctaacatgggcactaagcgaaaggtttcgcatctaatccgcctcgggctgctgaggagcagccggccgaaacccgacgatttaaaatggaaagtaggcgttgcaaagtggtgcaagtcatctgcctacctgatcggctttctctgacctggacgcccgggctgttctaggtccgtatacggagagaaacccagcacattgtcttcttgccctccattggaattctgccatcggcattcacaatcagccaccgtatccgaacataactgcttcctgaagcagtccttctcctcgtgttaacgatgtgggtatcctatcatccggtggatatgtaccgagatcaacccggaccagtgcgtgaccttaccccaggacgtgtcttcgtgcgcatcaaagcgtgcatataataggcgaccacccggtgccccctgggataccccagataactcttctcgacgctggctactcaccacaaccagcatttcgaccgacaattgggcaagacgctacagtagcgcacgaacagccatgcctctcgcgcccaagacctataccttcctttgcggttgcttcgcagcgtgagtaactatctggtagagcggaagtggtctcgaattgaccagacatctatctaccagcctaggatcgatccttttcggatatgatctcggagtcatcgccgcaggtgggtcatcgcggtaaagacgcgaaacatcgagtcgtgcgctaaccaatcgtctcgatgcttccgtctcatagtcttgcctgctcccaatttccttgcgaccatgggcggcttgacgtcttcttacgagggtttcatcgtctcttccctgacgctcgggtgagtacccgagaggtttccgacgcggcttgaccagggcagctaaactcgcgaccgtgcttcatgaccacagagcgttctgcggatgtatcccagcctccttgattgccgacaagttctctcgtcgaactgccagtaagccatcttgttgaaaaccgccaagctacggtgtcatgaactaagtcacctactgcgctccagttcttgtcggagccctcatcttcttgctcggaggaaccctccagactgctgcgcagaacaagggaatgatgcttgccggtcgattctttgctggattgtccatcggaatgctggtaagtccgaccagaacaacaaactagaaagaagacattagctgatgcacgtaaggcctctcggtgtgcagtctctccttgctcctcgtatgcgtctttcgaaacatatcacgcgttagaattcccgctaagcgttgtctttcccgatagtctaccagtcggagatcgctcatcccgctatccgaggacgtttgaccactcttcaacaagtatgtttcctcgatgagtgcccgattactccgacgaacgacggcctgataaccacgatcactttcagttcttcctcggaatcggcgctttcatcgctggatggatcggatacgcgactaccgagacgagctggggaactgttcttcaatggcgtcttcctgtaagtccctgtggaccacatagctctgatctatgcttaccaagtcatcggggtttccagttggccttccaattgctgcccgccatccccctcgccgccatgatcttcttgctccccgaatctcctcggtaggtctgttccgacattggcgatagaacttcaatcctgactcgacgctcgtacagttggttgatgattgttggccgagaggaagagtctttgacgacccttgctagactccacgctcgtggcaatgagaacgacgcctttgttcaggaagagttcaaggagatgcgagccaaggtcagggaagaggccaacgccgagagcgcttggaggcaggtcagtcagacttcagcgcgccggaaagaaagcccctgatggctcggctgacaatcgtcgctcgatcagatcttcggagaccgaactaacctgcgaaaggtcatgctcggagtcatcctccagttctctgtccaaatgaccggtgtgtctgtgctgcagtactactctgcgtgagtaccaatggaacgatatacaccctgttctgccgcttatgaaacgtcgtaattcacagccgtgtcttcgaaggtgtcggtttcaagcccaacacgactttcctcttgcaatctatcaattcggtcttggctctcttcgcccagttggcctgcgttatctggattgacaagacaggccgtcgatggcccatgatcattggtaacatcggatccggttgcactttcattggtgctacgtaagtctatatatcatgacttgaacataaagcccaactaaccaaagcgtatcgacatgcagcatcatccaagctaagtttgcaaacggaaccggcaccaagggcgacggttacgctttcgttgccatgacctggatcttcaacatcttcttctccgcctgtatcggacccttgagttgggcatagtgagtcgatacagaacggacgagttgtcgaattggcgtgctaatgagacgacactggatagccccgtcgagatcatgaacaccgccatccgtgccaaagccaccgccttgacttccatgtcttgctggattgccagtacgtcccaaaacatggccgtcatatacgctaccgcttatcctctgtctctgccccgcaatagacttcatgatcggacagatcagccccaaggttttcgacttgatcgactggaggtactatatcgtatttgccgtctgtggcttcaccaacgccttggttatctggctcttcttccccgagactgctggtgtaagtataacttttacacatcctttcgcacaacctgagctgatgattttacaacctctcatagcgaacgctcgagtccatggatcgtctcttcagggaaagccctttgattgtgcccttcaacaactacaagttcgaagagcgccgagaccccgaagccgggttggacaacccttcgactcctatcgacgagaagagcgaattcaaaggcgaacttgcgcacgaggaggacagccatgtcaacaggttgcattgacctatcggaggccgaggcggatgactacttttcgtttttatgggatcttgatatgtggaagaccgcatcaaatttgtagtactgagaagttgcatagcttgatagctagaatgtcatgagaatgaacgactgtttcgaaatgcagtcgcatacctctccaggccgcgcgagaagatgacgagtccgcggcgatccagttcaagctgcagataattcgtccacgtgtttcagagtcaacgcaacccaccgctgagagagattctacatagtttcagacaaccagacctgtccgcataaacaaagggctccgttatctcgaagctccgtagcccccttgttaccacctttgttcgcccctgatcggcgccccgtgcgtagccccctttgattggacattttgcctctagactacgcacagctagagagtgtttcgatggcacatataattagtaccctcttgatgaagaaagattccgttccgacacgaagttgttagtcgagcttaggcgatcagtttcggagcagatcaaataaacagccgtttcacagcataaaccatgggcatcggaaactacaccaccaatgcggctctcagccagcctgtcattgcccttggaatatcgagcctaagtcttttgctcctcgtagttgtcctactgtctgttcccggtcccgcccaaggcatgtattggtttcaaatggattcgcctacaggagaaggtgccgttttgaaaacaggtgttatgggttggtgctggacaggagtgagtagagccacgcgagtcgctggacaatcaaatggtacttacatgccctataaaaaagaccagtaactgtacctacgctcctctaaggtgaggccatctttgtcttgaagccttcgccctttactgagcgcgccgggatcgcagtgaaaacccctacctgaatgagatgttcgacgtcggttctgctattaccgtcaaaactttggtgcctctgtcctgctattggacgattattgccgtcttcttttggggagtcttgacggtgactgcaccagccggttatcgggtcattggtactgagtatcttgctcgtcacctgtacttcaacatcatcgaggtcgccgtactctgcatgcaactggtaggtttggtctccttgagaaccgagcacaagtctgactaggtttcttccttggtagttcggctgcatcctcgcctggctggcgttcggatttacacacaatgctttccgtgatctgaggcactctggtgtggagattcgggctgggaacgccatgcccacaatcgcggtcgccgctacgatcgcgatgcttggtttcggcctaggcgcttatggcctacatttgcgaatcagggaagccgatcgcgtttggaaggaagagaactaccacgctaattccggtcagcagggattggtccagccggtgggcctgggacggggtatcgagaatcgacctggaacggggattgtcggtcaattccgtgcatctcgggtgtcgtcgaacgccgaaccagatcctcagcagatgagggctagatcttccgattactccgatgctcaaagggagaagggttccatgcaatttggggctagaaacgggcagacaaagctcgtgacagacaccccttccttactcgttgtcgacgaaaagggacaagaaagtctggtcagtgatcaagcgatcgaggacaagctcgacagcgagtatagacagcaggttcgaaggtaaggctacaccaatacgcgacggcccctgctagcttgtattgatacttttttcgtttttcaggatgagcgtctccgagtctgggccttacccagctccagccagcgctgcctgagtgcaggaatatcacgtttgtgcttctcaagtcattcgatttcctttacaactttcggtgcatgcgcgtgagaaagctttccgtgccgtagatggaatgcgcacagagctacacttccgctccgagttgggtattgtaagcagtattatagacttctcgttgttatacactggtcgtcgtcaatcttgaaaccgaacaagtaggaaggggactctgcctgatcaatatatatgccctgttcatatcttgccatccaggcggtgctgagcactcgtttatgcggcttctttccgggcaacgtgctcctcgcgttcttgatcgagaatagcttctccggaggcagagtccgggatttcccctatcggccgaagcctgtgcaatctttcctcgagctccttttccttgccttccttttgcactcgatctcgatcttcccgctccttccccttttctcgctcgataacctcctcctcccgcttcttgtcgtcgaccagcccctgcaattccttttcgagctcgtcctcgtccacttccgcgccgacattggaaccagcgagggccaaatgcccgccactctgaatcgcttcgtcgatctcttgctgatccgcaagcgcgtccgccaaggcatccatggtcgcgtcgacacgttctctttggagcgccgggtcggcaaggaccgcccggagcgttgaagtggacgtctcgtaagctttgatgatctgttcgacgtggtcgagtggtgcgattcgcaatattggatcagccactacgcatgttgtgaaagtgcctttgagactgacctcggcatctccctgtgcgttatcgatgcctcgtagcaccgtcctgagctgttcggccgctccgacgcgtttctctaggacgccctccagttgcttcttcgagcggaggtaggagagggcgatcgtcttttggttctgtttcaggaacgtcccagcctttgtttgcgcgctgtcaaaagagtggtttcacgtcagatccaaacgacccgcctttcctcgctattccgaccgagggaaaccagaaaggggatcaagagacgtacctgatcaattcttggtgaatgccttcaatctgcttatcgagcttgtccagcgtagccatgatcgccaccgtcccccggtccgcctcggtcacttgaacctcgctcgcgtccgtgcctagagggacgatcttgtagatctgcacgagcggcaaaaaggagaaggtaacgctgcttatcagtatccagtgtcgacgacctcttgataggctcgaagacgtcgtgacgcacctctcccttttcatcggccaccaagaccttcttgtccctctccaagtatttcaataggattttacaatccctctcgctcaatccgatagcctcttcaccctggcctttcccgcttgtctgcttcgatcgaacgggaagcaagactgtcgagtatcgcgtcaggaatgtggttggggtgattaggtgcgccgaggaagtcagaggtggagaggcagagaggtacgagatgaaattctgtgccgcttcctaaacatgcaacgggtcttctttgacatcagccaagacggttcccctgcgtattcaacggtatgagcggactgggaactcgcctcgactagcccgagatgaaccacccggacgccctttaggcgtttccagaccttttcgtcatcgaccgctttaggagcagaggaactgggaccaaaggggttgagtttcgagaacccccagagaagcggggcggttatcagtcgggaggcgagagaggggggctgagcgattgggtagggggaggacaggaaggtctccccgcccacccccttgtcgctaagacacagcatcttcactcggcaaaagttgcagagtctctccaccaccgggactatcaacgacgatagacatataaaacgacgcaatctgacaagcatatatcaacagcagagagctcaccttggccactagcgactcttttggagaagcgatcgtcctgcacctgaaactcggcgagatccgtcacccttgctcttagccaacatgatggtgccaaaatggagatacctggcggctgcagcaggaatgatggtcagtcttttccaaggctatcgaatttcgctcaatatcagacttacatgggtgtcttctgaatctctggcgcgtacttcgatccagttcggtcttcacttgctcctatcagtgacctcctcgacatattcacatcacacttccatcgccaagatcttgccaaacaagggtaacagcccaacggatagctcaacactataccatcccaacgccggcgcaccaggatgggcatcggaacacacgccgtggctagagggtagcatggtcataccaccgacaagcattcccaagaaccataccgacccaaatagacgcaaggccaaagccgtctttgtcgtccttgctaggaactcggatctctgggcgttgttagagagcatgaagcaaatggaggaccgattcaaccactgggcggggtatgattgggtgtttttaaacgatgagccgtttgatgacgtcttcagaaagtcagtccttgcgatcacgattgatataccttcccgcttccgctgcgacaattcgctgacgctccctccatctcgttgccgggacactcaggtacactcaagcattgaccaactcgaaatgcatgtacggtcagatcgaaccggaccactggcatcaacccgaatggatcgacgaggagcgagcgaccgcggcgagagaagagatgataagaaagaaagtcatctacgggcactcggtaccgtataggaacatgtgtcggtacaactctggggtgagtctggcttatagttgaggattagcgtttggacacgtgttctttgccagggagaagactaaggtgattgctccccgcctgacagttcttcttcaggcatcctttgctggccgattacgactattactggagggtagagtcagtcatatgtgtgggtatagaatcgtcaggaaacatgctaatgaaatgccgatgatcgtgtagaccctcggtcaagttcttctgcgacattggtgagcccacacgcccaaaccagaacctctatccctccgggctaattcgtactccctgtttgcagcttatgatcctttcctggtcatgcaagaccaaggcaaggtctacggctttacaatctcgcttttcgagtacatcgaaacgattccctctctctgggatagcgtcaaaggtcagtcaggtcgacagctggaaatcgcacgtgcaaggtccgccggactagagctgataccgtcttcttcgccgtatatatcgtgttttgtctagacttcatcaagaagtaccccgaatacttgcccgagggtaacggaatgaaattcttgagtgatgatggcggagagacttacaataggtgtcactgtaagtattcaggcttcctccgccagatcatcattgaacgccgagctgactcttcaacgatttttgcgctagtctggtcgaatttcgagatcggagacctgcgtttctggcggtcagaggcatacatgaaatttttcgaacatctggacgaagcgggcggtttctactacgagcgatgggtgagcggaaacttgcattctttttgcgtcgggagtcgtggattgacgcgactcatttaatccgaccagggtgatgcgccggtacattccatcggagcggctttgtttgcgaagaaagagcagattcacttctttgaggatatcggttataggcatgagcccttccaggtgagcgttcggtgtggtatttgcagctcgcgttttgtgaagactgctgacaaaatgttcccgacagcactgcccacaaggtgaagcccatgcgcggggcaagtgttggtgtgatgtcagcaacaatttcgattgggaatggtgagactcatataccgaggtgataggaaatggggaaagctcacctcctatcttgacaggtactcatgcacgaacaagtacgtcgacatgttcaaggagtagacgggtaagatgagcggaccggcaagtcaacgaaatgcgttgggcgatcgtcccgtcgacctggtctggaatcagacagacgggctccatcctgtatcgatcgtatgaaaacggacccgccctgcgatttacacctatccgattgacgagcttgcgttcattatacgccaattcttccgctcacatctctccattgcattacttggaggtgattcggactccctccctgcttgtcacccatctgcagttggcgtttggtatagtagacacatgatgaggctgattcgacgagtcatatcaaaataggctttcgtcctccgctttcttctgctggaggctcgcttgatggtcccatcgcgttcctgccatctcgtctcacttcattccagttccgacgatcgcggctgaccggagcatgagaggtagccaatgtccgcacaacagaacttttcataataatgatcgagtgacactcttcctggagcagtaattctgaagtggtgatcaattgtccgggatagtcattggacgcatatcatcttgctgcgacgggctggatacaaatttggactggcgaaatgcgaaccgggaagaggagatccaaaaacgaggtttttttgcaagtaggggtgcaagtggatcatccaggtccgatctacaatgcaatcgtaatcagttacatgttgcaaggtgacctgacccaagccgattctcacccttggcatatcatgatgttcactataacagatggaacgagaatgagtagtggtcgagatagagaggcgaatgaccctggacaaacctgaggcgatccagagctgcattgtactgtgctactcgatctttgtgggtcatctttgccttcttcttcgctcgttcccgtcgctgttccaaaaggggtattatattgattatcagcaagctcgacacaaaacggatcgtctcttggtacgcacacgttcttcctgaatcttatcgtacttttcctcggctgccgtcttcttcctaccttcgggaacggccgcagagccggagctcgacccggcctgaaccgaaccttctcccttgatttcggcaacccgacccgatcgttccacatcgtccttgatcacagccctttccgagtccgtgtacgatttcttctttttcctgtacagatttgaaggggagataatacaaggacgaattagcacctatattctgccgggcatagcaaatcgaaggcggagaccgacttcttctccttgtctccctttaaccgcaaggacccgcctggtcggaaatcataagcgtcactcattctggatgctgatgatttgcagatctatgcaccttgatttaagcgtgaacctttccccgactacctggcgatcgtcttgatctcagacaataggctgatactctctgtagactgagtgggtacgagctgatgtcacgcgataatcatttattgtcacctgacacgccatatacgtgctgagggatccacatatgctgataagaaagtagtaatgagtgatgatgtgaatgcgaggtgcagtgacctctgaagccgatcttccaaatatctttcgatgagtctgatctctttgacgattttgaaggcccgattataattacaaatcactacgtagaccgaactataacaaaatggcgtccgctcagcaaccggtattcgacgagcctactcaggtaagccggggtcccgcggtcagaaactacgcttagcaattcgcaagtctgactgatccgcttcgaaaccgccctggtcattatagcgagaactcgccacctttttggagcaggagcaggccaaagcgaaaatgcagtcgtctatccacgatttgaccgaccgatgttggaacacgttagtcgccgagactgcgaagcgtatttccccttgacattgagctcatcgagcttcgacctattcccagctgtatcaccggttcgatcggatccaagttcagtcggggagaggcctcttgtttggagaactgtgtcgatcgattcctcgactcctcgctgttcatcgtcaagcagatcgagcagcaaaagtcgacgatgcactagacgagcagagaaaggcgacctagaatcattcgaagccttgcaggaagaatagcatacgccccttcgacgatcatggcgatctggcttctgtactgtacgaaaataacatgaaacattgcttctccatagatgggcttcccccttctttatgtgcgagtcgcccacatggtcgaccatgcagtagtcaagggtcacgtctcgatatgctctagaaagattctcttttattacaaccgtgaaacatccgacttctggtactgagatcaggccgagacgggcttgaatttggcagccgcctcgtcaaactctcgcgattttaagtcgtactcggagacgctcgggtgggaagcatcgatggatttgagttggctggtagcagaatcgtgcatcgataaacgtcagaagtcgtacaagccgaccgccagtctgatgtaagactcactcgaaacatccgggcattcctagagtagcacccacactgagcacagcagcatcgtttttgccgttttccgtctgctgagcttcgagaatatccgccttggcctcgtcgacgtggccgagcaagagatgagcggcggcgtgagaggccaggacggtagatgtacggcccgaaggaagctgatagagctcttcgtaaaggtagtacgactggttcagaggtcggccgccctagaacaaagcaaagcattcattgtcagtcattcctcgcgatcttacagactatgctttctcaccgttttcatgccgatccacgcttccatgatctgcatgagcagcgagtcttctccgaaggatttggcgttctggtagatggtttgggcgacgtcacggcgatgaatgctgagcaaaagctgcactagaagtgcggtactgtttccggcgaaccaggatgaagatcaaaatcatcaagattgacaggctgtggtcgtggacttaccattccaagtccgttttgccgcaaccctcgctcaaggtagtaaccgcctcctccacctctttttccagaatgaacacggttccagcaatactcctgaccactcgttcctcctctaccgtctgctcgttgacctcgtcggcatcatactcgaggacgagatccttgagctcctcgaccttgctcaacttgtcatcggcttgcaggtattcggcaaaagatttgacagctcgagcagaagccaagggctcgttggcagcaagagcaggttcgataacggaaagtgccgatgcggtatcgggtgagggaagcgctagatgagcacgggcggcgtaaagggcccgggaaagggactcagaatcggtctgatcactgatgtcaacggatgttgcttcgttgatacaagctgcggtattttagcatgtaagccttcctgatgcgactgatgggcgacgaatgtgaagcctctgcacctttgtacgctcctgtgacacaaaagcggcatgcaatattgattaaaaccctgacgtgtacggcccacgactgatgtttgactgaccctgccaaaacagctgcttcactaagaaaagggcgtcgctgtccattttgtttgaaggtgtgtaatcttggaagaagctgttatgctattgtttgttcgactgaaccttgaactctgcgtaagatatggtcaggggagtcacggatcatcaaatggatcaaatagcaagtaacaggtagccaagagtagatgaggttgacgttgcgagtgctaggtggatgccagtgttgccgcggatacaaatcgcgcggtgccgtaaacgcggttggctgtcacagtagatgaagcagggtcttttctggtgtatacaagagagtcggtcactctgtttgaaggaaaaggcggaaaggagaagtcagcgagaccgcagtgtataccaagaggggatgcttggaaaatccagtgcacccttgagtcaaagttctggatgatgacgggatgctagtgttgtttgaattcatggttgcgggctataagcggtgcgtccaccctgcgccgacacctttgtcaaggtgaaacttggtcggggcaatatcctctttgtcatatgtgttcaggctttgtcgaatatgagttcctctgcaatggcacacacacccctccgatctcaatccggggtgtgcgctgtagtttacgcgtttcgtttcgtcagcccataaggggtcgctaacgagcattatacgtagatatcagttcctgaataatgagatgaactaaagtgccgtttagaaatacagctgctcgcatcggaaatgatctctcagtactagccgagcaacatgagcggtcaatgacatatggacggggacgtcttttcgagctaaagaccattgcccacacaggccgtttcgtgacactgagcacaggcggtgatctcgccaggcaagatggatagacggttgaaaagaaaatgtagacggccgcgaaatacttgacacgattgacagcactgctcacttcgggcgtctccatatcgtgacactccgcttgagtaattcatcgatcttcatacgcaacaggactcggtctctgaccatcgtgccaagcagatctgcagaaggaagagaaggaacatcaaaagcgtcgatgggacggtaacaatgctccttttgtgtcactgctaacacggcattctgcatatcgtggaccgcttccctcagttttgcgtcgaagaaaccctataatgccgaagtattcctccgctgaatgcgtcagagcccagcgtcgtatgccagatcgtcgtcacccttcatgcccttcatggtatcaatcatggtttgatcggcgaaaaggtcacgaaagattcgacgcgattgtcaccccccggcttcggcaagtctcggtgattaaatgcatcgccgaagtcgatccgcttgcatttcgcactagaaacacagagtttcacatctatgagaggatgtcactctcgaggtgatagaagaccgaagtcatctcagcgctaccacgcgacgctggcgagctgctggaaggtgcaaagtcattgtgctgtgcatgctgagtgacaaaatacctgacttttcaaggacccgggggtcgtgatcatcgtgacctgcatgacctgccatttcgacctttcgattcttttctgtttcggcggtccggaaccgtctttcggtaaagacggtggtaaaacggggcgcgagagggaggaggcggcagagcaacggacgaatccgagatccgtgacgtcaccggctaactccccatgtctcgtatgccttgtccctcgttgttacgcctcgccgccctgtttccgcgtgggttcttgaaggacgacgacttgtcgaacgagcggacggacaaggtcgacgtccaaccagggcccgggattgaggttcattcacaacgtctctcgctctctggcatctcgagattacaacgtgcagaaggtcaacagatcaatatccgccttccttcaccccggtagatgagcccggcgtatgcgagatatttaccgcaacggacccgccagctgccagacccctttccgcgctggactattgcagaactcgatatagaacttcatccgtcgtatctcggattatacacctaattccttgcaaatactggccgattcggacaagttcgaggcccatccaggctcctcttgctaccagtaactctctctatcgacggtctatatacacggaacagacgtaggaaacaggagagtctgtagcatcaagtgcaggcgacgggactataccaacttgtcagtgcggtttcatccttggtcggcaagagaaaaaggctgcccagacaacacaagcacggtcttagacggagcgagaagacttttctctgacaagccggaaatccagaaagtgaccggtccgagccttgttcagcgagacgattctgaaaagaacgtacagtgaatccgaaagagacgtcatcaaggcagactttttcccaaaggaactgcggacactctttcaactacacggcttgtatagcaatggcaggcgatcaccgatgcgaggtcagtgcgagggcagacgtcaatgagccagattcgaggagctaagccaaatcgtccgtgctgtgatcaactgacaaattacaggtttgcggtgcgacttttactcgaccacaacatgtcggtcgacacatgcgttcccgtaagtttactggactgctgcatattcgattggaaggagatgcaggcctcgagctaaatacaaccatcccgtcacggttcttagataccggagataaaccttacgcgtgcccacattgcccggaccggttcgcgaggaggtcagtcgaatctggtcagagcatcatcttactaaaccaaagacactgatatccatgtatggcgatgcgttatgatcttattcagtgacttgttgtccaggcacgtcaacaagacgcattgtccaccggatccaaatgcaccggttcaccctggaaggaagaaaaaggccaaggaagtagctccgcatgtgcaaccgagcggcaatgccccagcggacagaggagtcgcgaaccatatagtagtgcagcccactcgtgtgccgcaggaagatggactatcggccaacgtaatgacaaggctggatggcaggtggagacatgaaagtaacagctcgggcgacagaccgtcagtaccatcttctccacaatatcagcagcatctgccgatgcagaaccagcagcaacagcactaccaacagtatcagcagcagcaacaactgcagacgatgggatgggtcggtaccggcgtcaacgtgggacctctgggtggtggagatgtgatcgagcgtttggctgcagggactggcgagctagatggggatgagagcgaagacgatgacttgtgggacgggctatcagggtgagtgtcttgcgcagtctagcaaaatacacgcttgcgcgatcgcttacctattgaaaatcgactccagacaacctggaatgtatcagtccaccaacgggtttccgatgaaccccactattcaacagatggccaacatgcaactgcatcaggtgccgacggggatagagatggatccttacgcaaatcaggcttatcccaacatgcagccggcatctcagatgccgcaactccatcaacagccacagcaacaggccttcatttaccaagcagatgcgaccagaaattatgcgccgatgctgaaccaagcagacaacaccgactttatggcttcgccacaacggaacatgtcgtttggttcttggtatcaaccgatctcgccaggccttatggctgcaccccctattcgcccggtacatgaagggtcgaaaggagtcgatggacaacagcgacaaacacatcagagcccggtaaatattggctcttctccgatgatcaacccggtctcgctggcctcggatggacgtgccgtcgggccgggtcaatctctgtcccccagctcgtccgcgattggcaggccgatcgacatcggggcatcgctgtcgccctcatcatcttcttcgggacagcatgcttcgcctttcggagacggatactcctctaacatgccggcattgcccgaaaacggtaacccgtcagtaagccacgtctatatcaaccgacccgccaagaagcgtgcatgtgagcagtgcaatacaagtaaagtgcgatgtgactcgcagctgccctgtcgtaagttctactcatcgcgggtggcgaggagatgtcaagactgaccgtattacaacaacctcagaaaaatgcacgatgcgaggaatcagatgcacctaccccattgccaaaaaactcggtcgcaaaagtctttccgaccagcatcacatgttcggcacaggtgcttctgacccgcaaccctggatgtatatgccaggtcaggaaccttttgtcaaaccggacaacccagtggatcgacgatcctccatccatttcggaacggccaacactgcgtcaccgatggcagccaatgcagcgatcgctcatgcaggcatcaggaactctttctcggcattacaaagcatgcctcctagccattttgcacggctcagagacagctcgcttgacgatgatgcggtgtcactcacatctggatttacaacaagtcatgcggataacacctcgcgaagagaaagtatggccgattcaatacttgcggtcgaagacgagaccggtgcaggcctattgcatatcatggatataggtatcgctccagccgtcatcgagggagcccagctagataagtggccaagcaacgggatcgggaacgggatggaagcaccgggaacatctcgacccggtttccctgcatatcacatcgacggcacagtctcacatcgtcccccgagcttatcggacgtgaaggacgcttggagacaattcgcggctggacagcagccgatttcgattggtggcttggtaccagggccgcagactcgtccgactttcctacatcgagcacgctccaactcggttccggaggtgtatccaaagcatctcgtcgatctagccgtgacggactttgcctcggacccgcgggcagaagtggagtctttcaacttcgcccgacccactgctattgtcgcttccccggcggacatccaaactggatcggcctctcctgctagtgctctcggccctaacgggccattcgatgggtcgaaaccgcagtccatcatgaggggtagtagcggtaacagcagcgtcaacatggttgaagcgatcctgccggcgtcgggcgatccaaacaatgcgctcttcagcagtccatctgggcaagatcaaaacggctttgttatggattccgtacgtaacaaagagagaggctcaatgaaccagtcaattgcccgcccctcgatcgctgtcttccagccgacggcggctggaactgtggcccgccatatcctgcagcaaggcggatctcagactttggccccggaacgagccccgagctttatcaacgcgtcttttctcgacacggatcgcaacaagttcaaagttccaggatttgttggacaatctggcttctatgcgcaacctatcgtctctacgaagatgtcctcgcttactgcccgtcccggcaacaagcggcttccgagccagactctgggtccagactatcaaaagaagttgcccattgggggggatgccggccagaccactgcatttgggagcatttatccgccttcgccgctagctggtactcctaccacactcagcgcgcagcagactcacgcccggcggtactcggtcccgggctggttgggcgggacgacctttggccagaacgaatttgtcgattccgaaagctcgttcttgcaggctgcttttccagggacgatggctctgcctgagttcacgcctactcaaaatcctcttctcggagcattcccttttccaacgccaaatcatacttgagtttcgccctacgtgcagttatcgcacgaaacgacgtcatgcgggaccagacgacaggttcgcggcctttatctatacggacagtcccgcgctattcaggataccatgtatcaccaccacaattgtaaaccgaattgatttgtagctctttgcctgctgagaactcgcacttattgtatcgacatctacggactatccatgagccgattctttctacagcccgtcagcagccctcacagcctgagttttcaccgggtttgcaatgaagggggaaaagctaggcgaactacagaggctcctcgtaagaagggtagacatgtaacgatatgcctcaatcagcagcagcagagttgaaacctgcgacaggcggccggcgatgatcataccgcgacttataaattccgcaagcccggttccgtaacggcagattccctcatcaccccctcgtctcatcagtacctgatctcgccgtacatcaggttgtaatctccaagctctaagcgaatggtcgttgtctactttcagtctcggtcaggcaccgcgattgcgtcccgatacaccgaacaaaagcgatcggtttgaatcaacgcgcgaggcaggccacggccacaccccgagtccagaatacgacaaaagagcaaaataagggaaagcaagccgcgggggtttttcgacctgcgcaatcggctgtcgcttcttgcacctgctcgaaccccttacaacctagtcggtagtcgccgcagcaaatcgcacaaggcattccttttcatcattcctcccattgtctgagcgagacatccacctcggcgatcacgacctcgggcaagatttaaggtttggagccttttcaagccttcccctaaatacccgatggtgccctctgtgtgctcatcttggtgtgctcgtcttggcttgcgaggacgcgaggacagtgatgctgatacgtatctacaacagttttgaaccgtttccagtttcccctcttccggttcgagacatgcggcgataaagaaccccaaccgaaaggcttgaactcacgctcaggtcacgacctgtctcgaaaagatcaagcgttacccggtatatccctccaagtcttatataacatcataggcgacagctgtgcgtacgttcaaaaaggccagtgagataatgccaagctcgtgttatttgaccaatcatgctctcctcgctcatatcacttgggcccatcatctggctcgtagctctcgttcgcgtctgcagtgccgacaatgcgttctgcggatgtcagaatagcttaacatcggcatcggtcacgatgacgccgcctactggtcagcaaagattcaactctgccactcaatgtcaggaggtttgctatgtcgcaaagaatccgaccccagcagtcgttagccggaccaattaccggcattcgctgtacaaagctagcgatgggacttgtctgtgcaccgacaagtatcagacgattcaaggtcaaaccaatggaatgccggatgcttgttcaaacccagccgactgggacaaccggatagtacagacgacgttcatcaaatacccgaattgctacgctgcggtaccccaggggatcgtcatgtcgggtattacaggaccggacagctgttccatcgaatgcgccagttcgctgaacatgatattctggatgaacgccagggtgaactggcatcaatcggatctcgtgatacagatgctgattgactatcgcacatctcccgcatgatacgataggatggcaattaccagtgcggctgtggaaccattggaacgcttccagcgacttccgcaacttgcggaccggataccttttttgtgagctcgtaatcctcgatttcgcccagtcgtctacccacactgatgaaccccatacacgcagatttactatcacactgtagctcaagcatcggctgggttgagtcgtagacaactgcgcgacgatcttgtcaagaaatacaagccaagagcgctttgcccaaaggggttcacggcgtgtcgggttcgcgaaggctcgacagcgttcgaggtaggttcaagcggacctcctcgattaatctccggaacgctgatgacgaaatacgacgctagtgcgtcgacacgcagaatgacattgattcttgcggcgggtgtctctacggttcacttggcgatgtaacggatagtaccggttttgagtacgtacctgttccgtttgtccagatccgctgatcgaatgctgaacattacacatgacaacacagttgttacgcttctggagccgcactgggaacagcaacatgctcagagggagtgtgtgagatatcccggtgtcgaggcagatatcagctgaaggacggttcgtgtgttagacgaccgtccggctgaagcatgcttgatacggaccagcccagccgcaattgctatgggatcgctattgtacagtagcatatggtgattcgtcctataatggtcgagcgtgactcgatgggagcggtgctggacagctcaattgtattacaccgactgattgccacgaaactagcatagttctgtcactcttccagctctcaaaaccgacactgaaaagacactcgatgttgcctatcagctttcgccacctacacctggaagcattgaatacagtcgatcacgtgatggatgtgccgctgatcacgtacgtaccgagacctcttgacacttcttgtttaccttttggtatcgaatcgatatgccgccatttgtcgtagctgtaacttcgcagatatactctggttagtccgtcagagctcgtagtctggacggatcagtgcgtcgggtgtcgctgcaaaggatcttggacgtgagatttgcggcgatgcctcgcaaagccgtctgcgggaacccgctcttcctggagtgggctgaaggtaagtcgtcacgcgcgatgttcacaactgaatagacaccttatcctgtcgaacctgcttctcatattcgtcatggtggacctcctgatagctatccaacaagaggctgagatcaaacaatggaaagctgccaacacttacaggaaagcatgcagctcgatacgctcctgccctctaccgtttacaaaaccgcaagacttgattaccctgtcccatgttggcccggccatggtcaagatgctcgaacagcgtcagaaggaacattacatgaatctgggattgtcgttgccgcaagcaccgaacgatgcagaggaggggcatggatccccaaccgaggaggatgggattggctttataccgcgatcccgttggtgctcttgacgcatgaaattgacccacggctacccgaagactaaccacacttcggatcatttacagtaaagattggctctactatgacagtacatactcaaggagctcgcaaacgtaaaggattctcgacagaactggaagagccggaagtggaagatgctctgtcacccgcccgcaagaagaagaagacgaagcctgctcaagccaaggtacccaagctctacgtgccgaagactagaagtgggagctacgcaatcttgctcgcattactgtcgaacgtggctgaagagttccggcgaccctttggacccgtcccggcgaatctggagtcggccagtgaaattgccgagttcgaagacgctcaacaagatcgcctaaatatagcattgcagaatgctcaattgacaaaacaggagactatcgctgctgctaaggtgtattccgactcggactttgaaaagtcggaaacgggcggacattatacagcttggagctcgatgaagacgctgctcggacggggtctcgtttgcactagaggcaatccagctcgattctggttgacaagggagggatgggctagtgcatccgcggtcaaggaagccgcgtctacagctgacgaagagcggatggcgtcaaatggacggctcgggcccccctccattagcgtacggccgcagcaactccctacgcaggtccaggtggatgtaaggcgaaagaaccctacatttggctcactccagactggagacggtagtgataccttttatgcttcttcgggtccgctgagcgagccaaactcgtccaagtcccaagttgctcctgtgcgaaccagatcatctgctcctgccgccgttgcgacggtaagggatgaccctttgatattcagctacttgggtaagcattcggtttcttcatttgaaaagaggcctgaaccattctgactgacgaacgcttaatacaggccaaggcgacttacctgtggctcgactggtagacgctcaacgctcgcaagatcaggagctgtttctgccggtaagaaggatcagggtcaaagcccaagatctcgtccatacgcaggctagtcggcttcgaaatttggtacaagcccgagatgtggctggcgggatccagttcgacggctggatactcgaagcgaacgcaccggaaacgtgcgaagccttgcgcgctcgagtcgatgagcctgtagcttacgggaactcaggatctgcatcgaagaaatgcattcaagacacggacgttcagtgtattgacatcgatcagttggggaaagatgccccaccaccgtcttcaagcgtttacgcggacgatggatttgacgccctaatcagtacctatgtcgcagagacagaggctcctctcgaccaagtccggaaactggcgtggagtgaacccgtttcagcgggacagacttcctgcctcatgtctggagaagccttccctttggctctcccgcgcacagctccgaagatgggaattgacctagctaccggaacgaccgacgacatgccgcctggtgcgatacaaatcgccccacaagaaaaggaggaagatgaggaggaggaggaagaagaagaagaagtggaagaagaggaagaaaaggaagaagaggaagaggaggagcaagaacagccagaaaaggaaaaggaagtggcgatcgaagaaataccacgtcagcgaggcaatctcgtgaacgagtctctttccagtcttgcaggtgcagagtccgcagtcgatgcaaacaggaacgatccgaaaactttccggcagagcgatgctatacggtatgatgcagatagctacgacgtcatcctcgtcatggatactcgggagatcaagaatcgccgggacgaggaagccatctgcaaaggcttgcgcgatcacggagtgcgtgtcgatgtccgggcactcaaacttggggacatcacttgggtcgctcgactcaaggcagacaagcacccacatctgagcggggacgagcgggaatgcatgttggattatgtggtggagaggaagcggttggacgacttgtgctcgagcatccgagacggacggtatgacgatcaaaaggtgagccggaacgaagctacttgatatcggatgaagctcaaattcacgctgaatctgggagacagtatcgattgacaaactcgtccattggccacgtctattatgtcgtcgagaattgggatatcgagagaaagccggattcgacactttctttgcagatagccactgccaaatcacaaacgcagatcgtcagcgggttctttcttaaggaaacgcacaagctgtcggagacgatcgacttcttgcgaatcttgaccgaaaatattgtcgagaccctgaagggccaagacctcttcctgatacctgagcggttcatttctcggtcaacatatgtccagctacaacgtcaactcaaaagcctgcatcctcaacggccattcctcatctcatacgaaacatatcaagccatcaacggcaagaacgccaaccaaaccgcggcagatgtctggccaaagatgctgttatgtgtcaaagggatgtcagcggaaaaggtcggagctatcattaagcgatatcctaccgcggccgctttctggaccggatttaccaaaagcaagctcaaatgggaacaggaaaggttgagcaaccctggcgagaagatccgagacctcgagctgttctttgcagattccgtacctggagatgggcgtcagaagataggagatgcacttagcagggaggttagtctgcgtgatcaagaatacgagggaccccactgagattccttgctgcagctgttttctgttttctgcgcataacgagcgatcatgcccggtataccgaatgtcgttatgaaaggtagccgaaagcagttcgaagcgtaacaagcatagtcatcccaaaaagtgagactggggaatgccgatctacttacgggatgactctgctcgttgcgcttcggaatgctttcggctacctttcgctggattgcgataaaagcctacacgaatgggatgatgactgtctcttggatcttacgattacctcgcacgcatagcgactacgactactcttaattctctagacctgtagacctgcgtcaccatgttgcatgtagacgatatttaacgagatgattctgctgtacgagtaaatctgatgatgacacgatgatgataccctcgatttgtttactttgtgaggatttgagcgcatcctgctgtgatggcgttttggcagccacacccagatcacagagtcgcctaccgattcacaaatcgtactcacagccattgtcactcgctgcacatctaccactatcctcacgtcctatgtgtaaaggctaagacgctatctgaccgctatcgtattcgattccgacggcagctgctcaatttgcttgcagcgatcggcaacatcgtctgctatatcatgccgcctgtgagaagtagtgagagtctacctgggaaacggaaacggtcaccgctagaggatggggaccaagcagatgatgtaagtgggtgtatgactagcgcatcagccactaatgtctttccggacttgaccgccgtatgggtcactttcaggatatgagcccagcagtgatccgcttgatcaaacgacgtgttccggaggaatttccagacgaacggacctctcattctgacagtcacactcagggtcggccgattctcagtcagcaagtcccgccgacatcgaagaaaatccacacgactcagatagcctatacgaccttcagtctggacctcagtcgaccttcatcggacagctcgaagcaagagtgtccgtatgtgttgttctaccgttattacgcagtcagactgtccgtaatcatgagattcgggagcaacagatcacaggttgagggctgggagaaacggcaggtagacagtgggtatcgtgaaactcgccgacgaggcctgtcacactaaaagggttatttgcatctgctcctgaaggagaaggtcagcatattgaacatttgagcccgggcaatccagtcgaccctcgacggttttggctgaagaaatcatgcatcgctacagatgcatctcctgcaataacgtacagcaaacgagatagccgcccgtcgcgacaaatcagctccggccggtgcaagcgcgaccgctctgcttctgaccacgatgatcgggacacatctcagagactggcaaggctgaacagcctctttgatctttacggaaatatcggcgcccatactcctcgattgcccgcagttacagcggaacgaggtggaaattattctgcgcagcgagagaggttcactccctctaattctcgagctggacacccttcacctgagtctacccggactctttcacgtcagctcagagacacgcgttcgaggggagaggtatcagtcacaacaccgatcggcaataccggaagccaaacgacctatgggagcgaacgaagcgatccaaccggcgctcatgatcgacgattagggtaagaaaggtcatcatgattctcctggattgggtagcggaaaatgacgtgtgcgatttccgccgtccaggaggactagccatcgaactctaccagttcaaggcgcatctcgaagcaatgttagcagaggacgtggtactcgcatcaatgtgtcttcatctcgaccatctagttcaaatgcagtcgagatgcatacgccaccttcacagcgatcagggtctctacccagaagagcgcttggtattccgcggtcccgcacaaacagcatggccttactaccgggtctcactcgatctcacagtctcttggtgcaacttcggcgaacggagtcaatgtcggcgcgcaccaacagtgatagaattgccttgggagacgctcatacgaacatcttttcgagcgagcagccttcaaacactgtcaacattcctacgatccctgggattactccagccaatacttctcaagcgcattctgatcaaatgggcggccgagaacaagcagaagaagacttcctcacagccgaaatgcaagggatgatgctggtggcatgtctccgtacaccatccccacaaacagtctcagacccttggtctatcggaaagagtccacgtacccgccatattcacgttgccgcttcgtcgatccactcgtcgcccgtctccaaaccaccgatgtggctgagagcttccggatcgagatctgagaccggccctaaatcgcctgtatcgccttcgtcgtcgtaccccaatcgatttgcaaacagtccggtacccaggcatcggcaagaatctacatcgatcgccggaacgaaggtgaaatcgcaaagcgatgccaagaagcggactgcgcaagcttgtgtcaagacagagctcgtaggacgccgcctgattgacacccgtcgaaaagcgatgatcaagatcccaccatccagcggcgcgcgtcgcgctccgtctcgagcggatctgggcagtgagagaaaggttgacgaggatgatcagatgacaggatgatagccaagcccgccaggcaatgtccgggtatctcatctatgtgagtataacatctccatgtagcatccatgagtgattccgcagttgtctactatgtccgacgtgcgcgagcgtcctccgccttatccatctgtactttccaaacttccatccatttcctctccttctccaacgcatcccgagcgacatctttcggtgtcggcgaagcctcgaggttcaatttattcatggcagccactgcgtcatccgcggcggatcctgtttgttcgattgccgctaaagtcagatcgcaaagtcggtgggcgttggcgatcacgccggtggcccccttgacgatgtcctcttcgctctgtggggagtacaggctcgacacgaaaagatccaggtccgaggaaagagaatgtgacgtctccaagtgagccggaagatcaatggccatcggctggtcgagagtgaacttggcaaatcggttgtgtatcgccattgtcaagcggaccgtggtatcgtactgaaaattcgaagcccatcgcttagatctcggtcaaaacagtcatggaacgtgccgctatgactcacgcccttggcacgctcccgctcctcctcggtcatattatcggtggcccctgcgagatctctctccaaatctgcccattcgtcatccccaccgaaatcctcgtccttgccgaccccctcgtcgacctcgagcagttctttgaactcggcgaatgcgtcatccatacattcccggtcatactgccaaactttcttgaaagcctttctttcgtccgagctcgccctgctgagcattgaatcgatcgccgaccagatggccgaggttgccaggaggaagggtttggggcccgtcttggaggacgatgccttggccatcgctgcggcgtcatcgtttgacgccttgaggtcgcccatgaaaacatctaggagtgcaagaatatgttctcctatcgctgcgacgtcctttcgccattcttgttgtaggcaagtgccagcggagacggccaggacgcaggcgaccagccggtcatagttggtgtccaccttgccagtctgagcgatggcagcttcgacaagaacgtcgtttcctgagaatgcaagagatagagaggtaacatcttgacgtaggtgtttcaaaacggtgatcagggatgcatagttggcctcgtacgacgccgtatagagagttcgtgaaggagaaggttcttgtcgaatcgattgaaggtagcggttcgaacgctcgacgccggtccgacttttagaaagagatcgcgataacattcgctaagttgaaatatccgtatacactatgtttgatggtagaatttcttgttcacttggggagaatacggggtgtaattgagaatataagattagatcatgtgggaatcgccgggatactagtactggagcaaaacgatttcaccgggaacgcgcgaagaataaaaaagttagaaagtgtcaagtcggaaatcaatcctctgggcctctgacgtcttcgaacggcagcatcagcactcctctcaggatttcagcctgtggtgagagcatcttttgggtctcacaccttgcagtcatatcatcgagaatcgactttatggtcgaaaccgaccaatttcatggcggacttcataagctccagaattcgagtatgctggctgcgtttgaacagaccgatgtctcgcgaccgcgactgcggagagcatttcgtatcagtcgaattctttccgggataagtattgcaagtggttcctccaaagccgcctgagaccaagaaacacaagataatgctttccgcacttccgtcgtcgacgttgtttccatgcccacccactttgccctttgccctggatcttggcctggtttgcttgaaacgtgtcggcgacgcgcgaaccgggtcagaccgagccaacaacatgcttccagcagagcagagtgacagacaagcaaccatgtatattccctttgacaatgctccctacggatgttgtagcctaaaatttgaaccaggaccgtcggctgacatgaagcgatagaaacttcacaagatctggttcctctccgaaaacggtccgacgtgttccccttcaacctctgccgatagacgcgatgttgagctggacgttgctcctggtcgtcacggcattactgctcgtagtcggcttcacagcagtaagtcatcaattcagtgactggttattcgagatccagcgtactcaatctcataatctcacggctcggtacttaggcctacctcgctctcatcgtcttcactccttctacgcttcctcgatcatccgcagagaccttctattattcagccaaaaaccctgagaagcctcttcccctgagctctctttccgaaccggcgaccctgggtctcagtatcatcgtaccggcttacaatgaaagagaaaggctcggaatcatggtggatgaggccatgacttatctatcggacgcggtctacgagtcggacccgaagcgagtgaccagtgtggattcggcgtggtatgaggacggcgtcgagctggtcgtagtggacgacggatctaaggatgatactgcgaggacagcgatcgaacttgcaggtcgttgggcaaagaaactgcaagcaagaagagctgccttggatgaaaagcgaaattggcccgaggtcgacatgcgagtgatcaagctggaacgaaaccgtggtaaaggcggagccgtacggcacgtaagtcgctcgaatggaacggcgaagaggcatttcatttgagtactaaacgtatgatcttcttctgctccgatcgcgcagggggtcctatttgctcgaggaaaacgcattctctttgcggatgccgacggtgcatcccgtttctccgacctaacctcgcttcaattggctatggacgccttgctcgcgcctacatctccttcagtgcaacaatccaacgggcatgctagaagacgatcgttggacggcgtgttcggcaagcagtctttgagaggaaatttggtgagacacgggctggtagcaggaagtcgagcccacctcgaaaagagccaggcggtcgtccaggtcagtattgccgatcgagccggcgttcgcgacacgcagtagttgatctcaagtcgcctcggatgtagcggagttttgtgcgaaacctgttgatgcatggtttccacatcttcgtacgaacactcggagtgagcggcattcgagatacgcaatgcgggttcaaggtcagtagtcatgcccaggcgactcgaacactcgacatcgggcttacatgatacatcaacagctcttcacgcgggacacagcccgtgccttgttccccactatgcatcttcaccgctggtccttcgacgtcgaactcttgcttctcgcctcgctcgtcggaattcccgttgccgaggtccctatagactggcatgaagtcgcagggagcaaaatcagcgtcggatgggatggaatcggcatggccagagatctattggtattacggggtaatttgttgatgggcagatggaaagtcccacgggtagtaaaagcttcggatgcggagcgagatcacacttaagacctgattatgaagacgacattgcatcacgggtccgcttgggcacactggatttcgctttacgatctcaaacgacgagggatagatgataatcacgtccaagctacttatacaacacgccacgatttcatgataatgttcttctcaggcaatccattgtccgtatagcttcatgacagcaatatcaaagagcgctgagatcgagcttctttgacaatcgggccttgaaggcatcaagcgtcgggggtcgtccgaggaactcggtaaccatctccatagccgtcttgctgctgccaggattaaggatggtgcgcctgtatcgacggctcatctccttgtccaacaggccaccaggagctttcttgaacgcttcgaagagctcgtcgcacatggcttgagcgtacatgtagcagtagtactattgaatgacacggtttttaaatgacgtggtaaggcagcgtgagttttgtcgaagcagctcaccttgggtccataaccggtctggccgagatggctaaacgcggctgggaagcaatctccctcaatgtaagggaaattgctatacttgttcaggacgtgccgccaatcttccaagatcgatcccggatactttccgtcaatgagatccttgctgtagaaaatcagagcgctgtgatagatttccaggcaaacgtcagccttcagaactttgtatgataggaggaattcacgaacgcccgagcgaaactgatttgtgtaatcgtccacatgccatcagctacactcgtcgagtcttgcagcttcttgatcaattcatcggggatgacctgaccttccttgttcattgctagacgcttgagtacctcgggctcctggagatgacgctcgagaaactgtgactgcaaaatcgattccaggctcagctgtagtcagaggagttccatgtgactgacgttcacttactggtgcctctgagaaatctctctccacgctgatattgttgagtctcccgaatttgctgcggttggcgcacatggcgtggatagcatgtccgtatctacaggtcaagagtacgttaggcacgaagctcaaaaaagacactgtatcctcgggattcaaccaactcgtgatatatcgtagagacctcttgataggttagcaaggcatcttctccttggggcacatttgtaacaagaacagcttcagtcgtgttgtgaaccccaccgaaggccttgcagacggtctggacgaaagcatgtccattcttgcctttccgaggatatagctagcatccagtaggtgttagataggtctctatactatgccaagatcctgaacttctacttacgtcgatgtagagtcttcctagcaattggccattctcgtcatcatacacgtcgtagcactcgatgccgctctcgcaccaggtcttgacgtcgaatcgttggtctagacgtactcctaaaagctcctgcatgagcaaggtgatttgggccaaaacattctgagcgcgcaaatacggcctgatgtgactgctgtcgaagccggagaagagacgtcgcaagagtatttctttagcgaaattagcctgccaaactttgagatcatccgtttccaaagcaatggctagcgcctgcttctctctgtccgcccgaggtttcgcaatctttatgacatcgtcgataaaccttgtgacactgtccagaccttgaagagtcaaccgaccctgcaggtcgagttccgcatagttgcggtagcccaagagctgtgccttggcttgacagatttcgacgattttctctagcacgtctatattctggggacatcgtcggcagtattcacgttgcaggatgcgccttacttcatcagatttacaataggttgctatcggtagctcgtcggcatgtcgggtagtcagtgtgacctgaccattctcgtcggcgggatgcgacttcatgaaatcttctggcatgccttcaagctctgacgtagccactttgacctcgatatcgctatcgttgatattgcgagagaacttggtgcgaagatcggtcagggtcttgtccagctccaatagctgatgtctttgagcttccggcaaggtggctcccgatcgatcaaaagacgattgccacctctctacgaaacacttctcatcggggtcaatcgaaggttcgacaaacgtcatcttttgtacaagcgcggcaagcgcagggtccttctcgaaccccgaggcgaagttctcaaacgcgtcgtcggcacaggcaccttcggtccggaaatcttcgtcaggatgaacgttcttgaaacatcctcaagtgtttgcgccttgatgagcctcgcactctagcctgtccaatcgcatcccccagtcacttgcgcaaggaatcccctcgtatgacttgagtaagttcaaatcgttctcgagctgggccaactgggctcgccattgagtgcggtaggtgttcagatcgatggaaccatcgaatttaaaagcagcgtgtgtcgacatgtctttgcgtgaaggcctcaaagcgatatacagacttgtcatatacgggtaggtgtaagcaagaaaggatgaacgagcctcatgagcttttcggtctcgcttatactcatatatatatactctttctggcgtccaaatagagtaaagtgatccagtatcgatgacgttcagcatcgcgacaaacaaagggaactgacttcggtctgcctttcgatcgtgacgtgaccactcgcgtcatatttcctgtctttgcatatcccctttgaaggtatcaggcttggagaagatggcttggcgacattcagtccagtcattttcccgatgaaaatttgtcacataaattcactcgtcgtagattcagaatcatgaatcatgattcacggatacctgtccagcttttcgcaaagcgttgtgtgccgagcctaacgttacgtctctgtcgctcttcggtggaagccggacacagaattgaaacatcctggcatgcctcgaaagccacttttcaccggattggcagacaatgagtcgtgcctaagcgaatactgccgggatgtggaacgattggcaggaaagactaaatcgactatcatgatgatttgccatactcattttacagcaagccttcccgcatatctggctgtcttaccacggattcaatctagtgtaagggcactcaggcgttcaagtacttgaagtatccttggggagtatagtatctgccgagaaaagctcgcaccatctcctttccatctaacgtagagcccttctgcagaacttcgcgacggtacctctgtgagacagtggcatcaagcaaacctttgggactagccttccagacttcgagcatttcgttgcaaatggccagggaattctggtaagagatgtaacgagggccgtaggaacagaagtgggggaagttgagttccgggtggtattcggcttcttctgggatgacggaaaacgcgccgtacaacttgtccgcatctcgccagattcgattgaaatcggcttcgagatcttccggttggagctcgtggtagaccagctatagttggacatagacggtctcgatatattagtagtatcccagagatgatcgctgaaagtacgtcaacccacagatagtcgcgacaacactaatcttccgcttaattcgacacatttagtatattcctcggacttcaacaacttttcgatcaggtcgtccgagatcgtttcacccttggcatcggtggcaaaagacttgatgatctcggggattttcagccagttctcggccaactgcgagggcgcctctacaaagtcttgctcgaccgaggtcccagagaagcggtggtagcgttgcccttgccctgccagaacctgatgcatgacgtgtcccagttcatgccagcatgagacagcgtcccagaaagtcatagtagcatcggtttgcgaattcagcccgacgatgagaacaccttccggaaattgtttcccgcttacgccgggagtcataccgaccgcgcaagggtgttgttctttatcctgtctgaagatataatcgatgtaaatcctgcctagaaggttttcaggccggtctgcatcgtagacgtcatgcacgagaaccgtttcgtgccacgtctttacatcaggtcgaggcttgaatttgactccgtagaattgctctcattggtgcaggagaccacgaatgacggcggttaccctgaagaattgcgaagcggtgctccgttcaaatccccccagcttcttcttggcaaccagattcttggcatagtacacttgccattgtttgagaggctcggtaattcccagagcgtcttgcaattctgctttctcctcctgcagttttttggccgtacctacctgaagttcttgaatcaaattgtatgcgttctccgggctggcgatcatctcagtttccaagctgtaagcagcataattgcggtatccgagaagtttggcgagccggaaccggacttcgactagctctttcaatagtggtgcgttctctggggtagctacctataaagcagtatcaggaacgaaggccgcagaaatgtttcctcgaggatcgcatcttacctgtttacacaggaaccatagtgactcgcggatcgaatcatcatcgcagaattccataacagacatccggtcggcataggtcatcttgagttcgatcatgccatcctctcgaaccggatgcgttctcatgaactcgtctgagaggcccttgagctgggcaggcttgacgagcatcgacctttgtccgtcgatgaggtttctgtcatacttccggcctagctcggcttctctgacttgaagctgtttcacctgcaccctaggatcgggtgacaagaagcagcctgctctgcggaagtctcgcttccaatgggccacgaaacgcttgtcgagctcgtctaagggttcgttatcgaggtcttccatgatgtaagccaaacgggaagatcggttgatctcgatggagatcttgtccagctcttgggcgacctgctcgatgacctgtcgcatggatgcatccggatggactgtctcaaaggtccaacatatgccgcgcttgttcgccaggtgtctggcgatgtcgtccaaaggaatcaaaaggttctcccgggtcggtttgtcggtcgtggtctcaagctgggccagtttctccctgcaaaagtggagcgtgtcgtcccattgcgccttgaatgcttcgggcgaaatcgcgccattcgtcgcaaagtcccccttgtcatgcgcaatcttgtgaaggtcggcgaaaccttgagagacctgttccttgatgatgttcattgtgaggattgatttggaatcagtatgagatgactctggtaggtgtcgatgagtcggtaggccgatcaaagggaacagggaatggtcgactgacgaggagaggcaaacgatgaccatttataggcaaagacaccaggagcagactagatacgcaagagacaaaggaatgcgaccctgaaagcaccaggcagcacgaacaatgcatttcgacgtattcccttgcaggaggttggcgacttgaaacgaggttggtggcgtcatgaagtacgtaagatcaaactcgtaagcgacgcgtatctaaaatcaaagtgacgtcgggcacggctcactcaccctcatcacctagatcacctactagctactccaggcttggtaaatgataaccatactcgatcaaagagatacaattgtggcttgtcgggcaatccccttcacactctccttctcttgctatggatttcgcgagatagaaagttaaatagaaaagtcttgaacaaacggctggccaacgccggctctctttcacatgacgcaggctccaaagaacgcattcgacctctttcctgcggatcaattcgatgcctgggtggaaggggtccgttctaaaattatcgatgggttggagcaccaacacatgcccggaggatcgcaagtgcgagtcccggaactttccagcaaggcacttggagctatcgaggccgcacggagagaggaagagctgactcggcaagcgatcgcgtcatcgtcttccctcaatggccagttgaatgccggagagacagagggtatcacttatgaggtcaaacaagaggtcatcaccaccacgacccttacggagtacgatgaaatcttcgccgatgagcaaggatggccaagttccttggtttatcctgcacaagcttctggctccgaagctgatcacgaggaggaggctgatcagacgggctatgatgccgagcccatgcctaggcaagagtatcccgcggataccaacgactcttatccagacgatcaagaactcgtttccgactatggagaagacggtgaaggagaatatgatgaagacgaccgttctcaggaggcccggagtgatgcaaaagaagacgattccgaggacgactttgagatccttgggtccgataatgacatggtggacaacgagcgtgacgaattgtcttccgatgaagaggaaggtgacgagttgccggcctctcaggaccaacaggagcaggaggatagtctcggggaagacgacgagttggacgtcgacgatgaggcgaacggtcgactcgactcccatcagttcatcgaccacgaagaaggagccgaccgggcgcaggagggtgcttcgcactcggataatctctccgctaatgcggacgtggatgatccggccgacgacaaccgttttcaagacggtatgggcacggcttctgctgaagacgaggagatggatgggcccggttcggctgatgaggacgaagtttactcaatagaggacagcagtgaagaaggaactaggtctgacggagagggaggcagcgaattcgaagctcgagtagcgggcgagcgaaccgctcaaagcacggaagaagaagaggaaggagcggacgaagaagaagaagagctggaagagttggaaggaggcgatgacgttctcagtgaagacgcctccgaccaagaacaagaccgagacgactcggacggtggcagcgaagatacggttgatgatcaagaagatttacagtcccgtgagcagcaatgagacatcaggcacgagctggactaactataattgctcaatgataggtcactctgatcaggaagatcgcgctcaacgggaaggattggcccaagatctgcgccgacctgtcttgccggcttcgaccgaatcagacggtgtctacaggggcacgttcgaaatcgatgggaccgctcaagagaatgtcaggattgacgagaaatacgctcttgaagaaggtatgcgacctcgaaacatcctcgacgtcatcttgtactgaagaagaacttctacctcagatgacaaggattcgcaacaagatccggaatactcggctgatgagcgagagtcgatcgaagacattcagtatgctgacgacgacaatggtaagcctcactctggatgactggttagactagtacgattttaagtgtattttgctcttttagcgggaacctttgctcaaacggatcgaacacatacctcccgagatcacatgcccacgaccgaagaggcatacgcggaccagattcagctcgaacctcagaccaaggaagaaatcgaagacgagatacgacatcacgataacagggacatactcgacgatacgatcatgtatccgcccaaccgagaagaatacgaccttgatggagaagatggtagtcatcatatcgagggtgtcccagcgggtcatgaagatgaagaggtcgtcgacgagacggatccgaaggacatggaagttgcggcctggagtaacgagcaacctgcggtcttgcaaccgctggcggttgagggaacccgcgcccctgaacctgctccgatcgcccatccagaagacctcgccccggaggtgcatgaagagtccagctcttcggctgatgcgctggcccctgctctgcaacgatctgccgcagatattggcacaatagttgaacggtcagcgaaagctccgtcgaacgcaatcgactcgggagtttctaccggaggaaatgagacggacaacgaggacaacgacatgcaggacgacacgttggcaaaaacggcctcgatcccggaggaggtggatgagctggaagatgcgtcgatacctgcatctcgtgcaacgtcaccacaaagactcggcgcacaaatcagctcgtcgacccttgttccaatcaaaagtatcgtacctaccgactaccgaaacaatgtcgttcccggcgagtggaacgaaggcatgtcgctcagattctcgcagacgaaagacatgaatccaggtcaaacggcggaagcccattcgcaaccgataaaaccgacagaattaggacagtctacagagagggaggccggacatgatcaggaaacgggatacatgggcgatgatgaagcaccgggatcacttcagatccaacggtcccctgagcagagcagtcacgctccggtgaacagcgtagatacggacgcagccgggttcaacccagagctggaaactggcgctcaggggcgaaatgagcgagatgttagcctcgccgcctcacgcggggatcaagactctctaatgaacgctgcgattccggtcgagaatgcgggttcggacaatttgccgaccacaaatcaagcattcggaattgagtcagccctgacggacgagaacctagctcttgttgcagtcgacaacgtcccgacggccaccggtggggatgtacgagacagtcaggttggcgtcgatgaaatatccgcccagtctgtgctaggtataaacgaccaaccgcgacgagcgaaatctttatcgaacgaggctaccggaactgtctcgcctgtcagccccgagcctaccgtcgtacggggtattgcaagtgaagcacagctcggggaatcggcatcgaaggctgtcgacatcaatatgccggatgcgcaggaggtcagggagctatccttcgccgacctgattcaaaccccggtggacagtccacggatagaggaagatatgtttgacgtgaccggggtctcggtacccggtgctacggaagagaacatcgcaagcggctcggttccgatggacatcatcgagtctgctgtccgtgacttgccatcgctaccagctcccagtcgcagtcctactccagagccgcatctaccaatcaacaggcaggatccggctcttgtcatggtgcctgccgttctgcaagagcacagttacgctcgcgtagaccatcacgaccgcgtcgccgaagcgaatcatcagatccatgaagcacatcggcaagcgttcgcctcggctgctggtagtatcgatgagaaccgttctcggatgccaatgacaaatctcatcgaggtgatcgagacgccttccgctgaaattgtcaaccggatgctcggcatgccacaggaagatctagccgactccgctgcacagtccgaagtggcccaggaggacactggttcagaaccgatcgaggcaagggaggcagacatatcgagcgattcagaggaatcgcccgagtcggaggccacgagcgatccggacgatataaacgacagtgaacctcgtggcttgactaatgctgaggacctagcaggtcaagaaggatcccgtattcatttggtttcagtctcagcctttgatatgctgctgaacggcatgcgcgactcagcgatcgcacgaatggctgcggcagaatatgacaatgtgctgcctggaacttctggcgcaaaccaatctccggagtttgatcagcccaggatcgacgaagtctttgcacctgttcaagatgacaataatgacgaggttgatcatcaggaagtagcgtcaggagacgaggccccagatgataccgtccaggagcttggggagaatgaaccagagttcatggcagactacgacgcacgtgagcaatctgaagcggcgctcagtcaaaaagacgacttggtggatgcgggagacaacagagacgatgccatgttaaatacggaggccgaagcgactggggctaggagccggtctgatagctcgcctgcattggccaagcctgaagacgaggacgagtttacgatcgttgtccagcctcgctcgtacaaccctcccatcgatcgaacaggacctgcgtccgtcatccatgtgcctaccccagataaccgatccgcgcccagtgacgctccgcaaacccccccggctcgttcgcgtgatctggatgcccggaatccagattccacgcaccaccatcacggggtgatcagtaccgccctgaggagcactttgcacgaatcggaacgaaacctgcatagcgagagtccggcgagccatactcgctcgcaatgccattaccacaagatgcgatttgaccggggtgcccattcgcataccatgttgattcccggctgcagcctcggcccggccagtcaacgcatcgagctggatgtcgaggatctgggacgagcttcgggtgaagagatgaggaggaaacagaacctgttgtttggcgaaaacttcctcggccatatgaagagcgaggaagaggggaccttgcctgcggacttggaacatcgattgtccgtcctcgtcggtcgcgagctcatcagggagggacacatctacatcctacccctcgagcagggtgtgccgcatgtgcacgtcaatgaagaggaggaggaggaagctgaagctgaagcggaagacggtgggatcgcgagtaggacgcggaggcggacttctcagacgcctgggcccggaccggtgactcccgttcgcgagggtgacaagaaacgtaaacatcgaggctcatccgtcggccggactcctgggtcttcgtccaagaaacgagcatccgagctgctggacgtgcaggaagatgtcaaggaggaggaggtcgagatcgacgaggatcgtgcgagcaagaagcggatcgtcgaggtggatggcaccccaaaggctgtgaacaaggcggagggagagcaagaagacgaggttgagctcgcggagagggatcgggacgacgaggatggggatcggatggatatcgacgaaagggtcgaaagggatacggaactacctgcgcctgctacgagtaagggctggttcggatggctctggggtaaaaagtaggaggacaagggtcacggacatgtggcaatacgtaacactgaccactggatgtgtgaactacctggcgacgacctgtgtaccatatcctagaccagtacatctttgcatgcgctctttcctttgatgaaacgacactataatcatgaatatgatcatatttcctgtatttcctggcgtgtgaccatgacgagtgtggcttgagattggtgacgtaattgattctctcttggcgggagcaggcacgagacagggtggattgttcccgcgcgtcataggtcgtcaccaccagcgactcatgcgactcgactcatccatcatggatcatggataaccctatcccatctctatcagctatcgacactaacagctcaagtcgttctgaaagctggcaaataaagagcaacgcaagtcgaccctgcacttgttatcctaggtccgtccaattcgcaaaaccggacgactcaggatgtcccgccaacacgagcctgaacttcccgatctgcccgagggtgagtcccatcgcctgatgtcttgtgcaccgcccatctaccggtttgtaatgacatgtcttcactattctgctgtcaaagctccgccttcgcgggtctacggtggcggatacgcttacaaccatcccgctccaacggttcagcagtacaaggccgacaagaccacgcacgacaaggaagccgaggaatacgcccaacagctcgaagctatccgtgttcgcaaggagcgagaagccgaggaacaacgtcgaatcgaatctcaacgcggatctgttgacactgaccatacacgggtcaatggcgacaaccatggtcatcagcgaacgcctagcaaggtaggagaaggcaaggctgccaatgaaaagacccctcatcatcgtaaagccactggcaaggaaaagacggaaggtcagatggaaaaggagcaaatgatggataggatgaacgccaaccaggtcgatcctatcacccgaaacaagaagggtcccaagggcgaacgtcgagtatgtatttccgcgtgtgaaactgcttcaagccgaacgacgagctgatcaaaccgcattctctgtgatgtctctcaggtccgtgaccctaccaccggtggagaggttatcatcaaggacgccgacatcaaggatttcgatcccgcccgcccttccaacaagggctccaacgttctgttgcaccctttccctcctccccgtcctgccaagctcaactacattcaacacaagatccagctcctcggtgtcgcatgtgccgtcgggatgggactaatctggatctttacggcgttcggaaacggattttggaggtttgtcaagaacagtttcatctgtgccgccgtcggcggtgttctggtcacgctcgtcagctttatcggacgtggactcgaagccgaggtcgacgccgtgagtggctatgagtcgtatggataacacccgatgccgaacgagcgactaacgtgtgtcattctgatccgtctcgtgtagatccgctacgacatgcaccgccagcgaggcgaggtctactctcctcctacccctgaatccgtcgaatggctcaacaacctcatcaagctgttttggggcctgattgaccccggtctcttcatctcggttaccgacatggtcgaggatatcatgcagcaatctctcccagggtttgtcgacgccgtcaggatcagcgatatgggtcagggaaccaacccactgaggatcttgtccatccgagctttggccgatgaacaaggcactcctggctacccgaaaaagcactggatcgacaagggcgacaagaatgccaaaagcaaggacacgatgggcaagaccgtagaagaggacgaggccggcgagtaagccttatgactgtggagggatgtcccgcggtgagacaccgtcgctgatgtggagcgcatcttatccagttattataacttcgaggtcgcctttgcgtaccaatccgtcgacagcagccatcctgactccaagtccaagaacatccagtgagtctcaagaaccagcagattggtacatccgatccctcatctgaaatcatgcctctttagtctcttgatcgaattcttcctcggagctttcgattggttccatttgcccattcctatctggatccaggtcgagtcgatcgccgggaccgtccgtctgaggtgccagatgatccaggaattcccctatgtcagaaacgtgagtcaagcgatcgctcaatggcatggaaagcacacgagctgatcgggacgcggaccgcttccttacagctgacatttgcgctttgcggagtccctcacgtcgaagttagcgcgatccccatgtcccgaaaattgcccaacgttctcgacttgcccagtgagaatatgagccctccgcactgaatgcaagatcccgctaaactttcgttttgcattatagtgatttccaactttgtggacatggccatcgctgcgggaacggccgaattcgtcgctcccaaatcaatgaccttgaacttgaaagagatgtttaccggcgctgctctcggtggtgagtcggtctcactcacgaattgaaagaacttccggctgaccgctccttgttccctttcagatactaccgccattggtgtatttgtcatcaccattcattacgccgaaggcttgtctgcccaggacagcaacggcaagtctgacccttatgtcgttttggcctatgccaaggtgagtcgacgtttagcccgtaatcccggggatccttttgttgaccgtttgatgtagtttggtaaacccctctactctacccgaatcatcttgggtgatctgaaccccgtctgggaggagaccgccgtcatgctcgtgaccatggacgaagtccgttccaaggaagacctctccgctatgttgtgggactctgacaagcgatccgccgagtaagtagaacggactagaatgggcaatttgctgctgagactgacgaatgtgttcatcatgcagcgacctcgtcggacgagttcaaatcccggtcaaggagttgatggagaaccccaaccagatggtccgaaggaccgatgacctcatgggcttcgaagacgctgacgatatgagcggcaaattgagctggagtgtcggatatttcgaaaaggttcccctgcgtaaagagctcgagaggggtctgaacgaggaggaaaagaagcagcagcctgctcagcctaccaggaccgctcccgagatggagatgttgcctggagatgtcggttagtgctgtttgagagtttgttccatcacagtacgacggctgacgcagccgcttgatgccagcacctaaccctgccaagaaggacttgcctcctcctccccctgatattcttcgaacccgccccgatcccgaattcccttcgggagtgctcaatgttactattcaccacgtaagtagtcgccgagactgcatgttttgaacaacggctgagttaagattcctatgaccaggccatgaacgttgagcgtcagaacctgaagggtcgaactggagaacgagagggtgaagccggacaggataccgaccaggccagcgaacaagctgataatttgcccagtgtctgtgagtgcggccgacctgtttcgtttcctgcacagctcggtagctgaactaccctatcaacgctctagactgcgaggttatcgtcaatggtgggtccgcatgtcctgttaccagtcttcctgatacgatttgcttatccgctcaatcgctttagacgagatggtcttcaagactcgggtcaagcaatacacctccaaccccttcttcgaggctcctatcgaagtgttctgccgagacttcagggataccgttatcagggttgtcgtgcgagacagcagattgcgtgagggtgtaagtagcctcatggcctatgcggacagttcaaaagccccaaacttccgactgaccctatcacctgcttgtaccataggatcccatcctgggagtcgtctccttgagggctgccgagatcttctcggaagcgtcgagtgtcactagcacgtgagtcgaccgtcttgagagcactgcatctgcgaacggaactgatgtcggcggttccatagctgggccattaccgagggccaagggtttggaaagctcaacatgagtctaggattccgaggcatgaagactcgattcgccaaaaacatgcgaggatggcaaacaggaaccctcgaagtcggagacgtgcagatcgacattgacgcccagaaaaagtcggacttttccgcttctggtacttcgctcaccatcaagacgtcggactctcaggaaaacctgtccaaaaaggatgccgaagtccacggagacagcattttctgggagagcgacgacttgcgcatgccgatctactccaggtattcctcttcggtcgtctttgagttgggttccaagggtggtctcaagagcctgatcgggaaagctggtcctgccgccattgctgtgctctggctgcaagatctgaccgatgacgtcgagcagagcgtaaagttgcccatcttcgttggtgacgacctggagaacttgcgacagaatgccatcaacgatcaaactgccgaacaccataactttgagctcatcgggtggatgaccgtcgtcttgaagctgtcttccggactcgaccttgaccagtgagtcagcaccttctgacttcgatgaccgcggatagaatggcagtggctgagatgaattggcctcaacagtgaacgacttcgtgaatccttgtcgagtgcccggcgacacgctttggaggcttacgagtgagttggaccggaggtggttacacgccgtgcggtctggctgacaaatcctgcctttgacgatgcagtcgaagtatgtcgcggacctgtctcgctcatctgcgatttcagcaaaacgactcgcagaagctaaagttatgtctttctttgtacaacagtcgaaggcgaagctcagattgcggagaagaacaggtgggccggaatgacacgacatagacccgttcgcacggctgactgtgattttcgctgcgatcagccacgccatggatgatggccacattgacaagaaagagcagaaggccattgacgaagcgcacgagcgacaattgctcgcccgtggccgaggaaaggctcagctcaagccttatcgtaccggcaagtggatcaagaacggtatcaagagccgtcttatgcccaaccataccaagagccgagagcgtgagtgcgacaggccataaggcgggaccggattggcatatggaaggcttgctgaccggttaccgtccttgatgcatcacagctactgttctgaccgaataaggaggttcctgttctaaagatcggtcgtgttaggggctagttgtggatcgtattgttctattacaactacacttcgaaactgtatcatgccatacaaatatacacggatatcctgttccctgtctatgagaaaccatgtctcagggtacgacctctttgctcgtccattcgtctcccctcttggtccacctcgtccgtcgatcatatccgctcttgaccatcctgacgacatcgacctcgtacggctcgaacacgatgagcgcaaagtttttgtacgatcgggtctcgggagagtctgtctcctggttctgcgaggcgtgaagcagaggtcgaggatacgatgagcatggtcggatcgacaggagactcgacgtcgagtttcttaccccaagcgctgaatctagcattttcgtgccctgggtttcagcatcttccgatcggttcgactcttcgaggttgtcctgatttcgagtggaagcgacgtcagccgcgaaaggggtcgacggtggatccaatcgtcagcgggacctacttccaggtatccggatggcacagctagcgtctctgtccagccttccctcgaggtggtcaaatccgatccaggtgtcggattcgcatgccaagccctggtacgtccgaaaaaggattcgctgtgccacatttccctcctcagctgcttcatatccagctcgacgtcatcgagatgggtactttcccccgctatccagcctctcgacgaaaacgtccttcccctcgcctgaatcctgatctgtagagattcttcaggaacccaggtggtcaggctacattccgggtttttcgcgagttggaggactttgggcgtgcgggcgtctgtagagcagaggagggctcttcggccaggtgaggtggtagggaagagggtgatgagggatttgagaccgatgttacggacttccgggcgggtttgatctaaggacagagtagctagtgcataggctgcaaggacaaagaggcagagtgagcgcgtggtctgagtagtagtggctggtcgggatgtgtatgttatgcgtatgttgtacggaacgattcgactcactggatggacctcgactccggctacgttcgacatcttgcacccagcccggtacagtcgatgacgaggctgctgccatgctgaacatgtgcctttgaacccggaacgtgcagtaagatgagacggagattcgaaagactcgaggtcgaactctggagcttgttgcaagagttcatcatcatgcatcatcaacatcatcatcggtttcatccgacgagacgaggttgatcggaagctgaacgaggcggacatacggtagtagtagtgctagtgatagctgttggttcacggacatgttactatttctttttgcccgatttctgacgatttaatttcaattcaatgtccgtgtttgcaagtcgctcactcgctcgctcgctcgggcatatccaaaagttcaacagcaagagcagatcactcgcaatatatatcgtacaacttcaaatccttgcaccgcacaagactctcggagcatcgtctcgcgatcaaatctttcgccacctccttgagacgaatcacaaaggagtgtcccacgccatggccgtctccatcgacgatcctctccacccttcggggccttcgagctcgaagcacaccttcaagacgctcgagcgagaaaggttgaatcgacacccgagcgagaccggtatggaccacccggcactggaagagatcgtcaagcctcatatcgccagtttcgatgcccttacggatatgaacggggatgggaccgggttgttacagttgggcgtacagaacattttgccaaagaccgtctttgacggcaagaagcgtcaggatgcaacacctggctcgtcgggctcgtttggcaacaagatcacctgtcagtcagcgccattagattgtgaactttcctcatccgaaaagctaaaaccctcgccacgatctagtttctatcacccatgtcaccctagggaaacccatggtcccggacaaggaccgtcaagcgaccgaacgacgagtctttccctcggaagcgcgagaacgtctcacttcctatcgagccaaattggccgtcaggatcaaatgggtcgtcagcggtgatgatggcgaagaggccacttacgaggagaccaaggattgcgggttgttgcccatcatgatcaaggtcggtcccgccccgtccgcccatacggttccgaaccccatccatatcagttagacttatactcgtatgacgatcatcgtgctctcagtcgaatcgatgcaaccttcgaggaatgggtgccgccgcgctggtaggcaagaacgaggaatccaactcgtggggaggatactttatcgtcaacggaaacgaaaagctgattcggtaccgtgagtcatcatgcagcttctgtcggttcgtcgaaagcgatgatcacgggcaagctgacgatgatatttgaggtcgatagtcattctgccgaggcgtaaccacgccgtatcgctcatccgaccttccttcgaaaaggtaggtttgggctttcttgattgccccttggctaccagcgaattacgtgctgatcactgcgtcgacgatcatagcgaggacctacttattcaaaatacggtgttcagctccgagcggtcaggcgggatgagaccgcttgcaccaacacgctgcattacctgacgtccggtggggctaccatccgtttcgcctggaggaagaacgaatgcgagtccttggtcatgtcgaagagtcgagacgagagctgacagtcattgtctcactggaacagacatgattcccctcgtcctcgtcctcaaggctctgaccgacgcgagcgatcgcgagatcttccaagacttgatccagggggaagacgacaacacctttttgacggaccgagtcgaactcttgctccgatccgccaaggtttggggtctacacacggggaacgccgcattggaatacctcggtgaaaagtttagggtcgtcatgggttgcccagaggattggtccaacctcgccgttgggggttacttgatggaaaaggtcgtcatggtgcatttggagagcccgagggataagtacaggatgttgatgtgagacgaggcgctctcgagacgaccatcgagcttggtggcaagactgattcactttcctcccacagtttcatgctccgaaaattgtactcgctcgtttccggcgcctgctgcgcggataacccagattcgccccagcaccaagaggtcctcttgcccggtttcctatactcgatgatcatcaaggagcgattcgacgaggcgctgaacggggtcagggcgtttatcgctcaggacgtacggagaggcagagccggagatttcttcgaccgtgagttatgagcaagcctatagggtctggatcgaagcaacgactcaatctgcaaacctatttccgtaatgcagccaagtacttcatgaacgccttggccaaatcaaactttgacgtcggtcaaaagctgtcctactttttggctaccggaaacttggtctcgcccaccggtctcgatttgcaacagaccactggttacaccatcgtcgcggaaaagttgaactattaccgatacctcagtcatttccgatgtatccatcgaggtgctttctttgccgagttgaaaacgacgacggtccgaaaattgttgccagaggcatggggtgagtggtcttttcggatttgatcgttcttgaattttgctcgaaagctgaccgctatgcttcgcaatgcaggcttcttgtgtcctgtacatactcccgatggttcgccttgtggtctgttgaaccatctgtcacattcttgcaagatcattaccgagaccttgaacgtcgagcatctgcctcacatgctctcagatttgggcatgactcaggtctttgcctcgaacatcgacggacgaaagagcgtttgcgtgcaactggacggccgagtcatcggatgggctagcccgatagaagccaagagtctcgccaacgctttgaggacctggaagacagagggcaacgccaaggtacccctcgacctcgaagtcggttacgtccccgtcagtaaaggtggacaatacccaggtctgtacctcttctccagccgatcgaggatgatgcgaccggtcaagtatctcgccaacgacaaggaggaccacttgggaacgttcgagcaggtctacatggaggtcgcctgtactccggaagagatcgaaaagggcacatccactcatgtcgaattttcgcccacgaatgtcttgtcggtcattgccaacctgacacccttctcggactttaaccagtctccccgtaacatgtaccaggtaagcgcaagtctcgcaatcgtgtcttacactcgggctgataagcgaagcgttcaccgtttatagtgtcagatgggtaagcagtccatgggaacgccatctactgcaattagccgacgaacggataacaaaatggtatgtcggcttgggtattcgaccgacgggcccttactgagatctcgcccaacgtacttcagtaccgactacaatcgggccagacgcccatcgtccgaccaggtctgcacaacacttacggatttgacaacttccccaacggtaccaacgctgttgtcgccgtcatttcgtacaccggttacgacatggaagacgcgatgatcttgaacaaatcggcgcatgaacgaggattcgggtatggaaccgtttacaaatcagacatctttgacctgcagggcgaaagaggggctaccaaatctctcaccaacccgagcctgcactttggattgggacgtgacgttaaggaggattcgccttggagaaaatcagtcgatgaggacggcttgccccgaatcggagctcgagttgtaccaggagatgcattggctgcctatcgggatgacctcacaggcaggaccaaggtgcacaaatacaagggagacgaagtagcatacgttgacgaagtccgagtattgggtacgtaccgtcgcagctaacttgatgcattgctgtatgtttcaaagctgactctttatcgttcacaggtggagatgccggtgacactgaagctcagaagattcacatcaaattgaggattccccgatcaccagtcattggtgacaagttctcgtcccgacatggacagaagggagtctgttcgcaaaagttccccatgatcgacatgccgttcagcgagagcggcatgcaaccggatgtcatcatcaacccgcacgctttcccttcgcgaatgaccatcgggatgttcgtggagagtatcgccggaaaggccggtgccatgcacggtatcgcgcaggatgctacgccatggcagtgagtctcgccacaggacccatggagttctacgggaatgctcatgctcaaaatgaccatctcagattctcggactcggacacccccgtcgactactttggtgaacagctgcgagctgccggatacaacttttacggaaacgagcccatgtactccggtattacgggagaagaattccaggccgatatctatctgggatgtgtctactaccagcgtctacgacacatggtcaacgacaagttccaggttcgaacgaccggtcccgttgacccgcttaccaggcaacctatcaaggtgagattcgagacgaagacagagaccaatttacctcgtgctgatcctcttgccgttgctagggacgtaaacgagccggaggtattcgattcggagagatggagcgagacgccttgatcgcgcacggaacgtcgttcttgctgcaagaccgtctcatgaactgttcagattactcgaccgcctgggtctgccgaatgtgtggatccttgatctcgctcgggtatgaagagacggtcggggacgtgagtggggattcagctggcggcgaatattgccgaatctgccgcaacgaggacgaacaccataagggagacggcgtgactgtcaacgtgccgggcagcgtgcgagtcagcccatacaacgccaagggcaagaatatggacgtcattgcggttccgtacgtctttaggtatctgtgcgccgagatggccgcaatgggaatcaagatctcggtctcggtacagtaaaggtagagagacgcatggtggtggagctcggtcggagaagcgctgcgtgcgcgcttgtattttagccaattgtttgtattccgattgcaattggacaccttttcgcttcgccatcctcaacccatttgagcggcgttcctccgtggggagaggtctgatctgctgtgcattttttctgtccgctctactactattcatgaatggacatgtgaatgtttttcgcaccgtcgggcagctgaactctaaacaaaagcatcagggatctagatcagacacaatgagtgacattgcgtgacaagtcgatggggttgcactcgcggcacgaattacacgaacggagacgattggggcggttgccgatggatacgctcgtcatgcaacttgtggggcaaaagcgatcgcgccggtcttgatgaaacgtctcatcgaaaggaccttcaaaaaaccaggctcgacacgttcgtgaccaaaagctgtctttcacgtgatagcgcggtcaggggccgaaagtagccccggttccagtaaacgtgtggcgctcgctgtgaactgcgtgcgacgtcatgtttattcccatcatgacgcgggaacgcctttcgatttggcagttgacagacagatcgggaacgacagcttccacagtgggactgcagcgcaacgtgcgacctgacctcggccctcggctaatgggcaaagcatcgtgggatccgctgcttctcccgctcaactactctggctccatgcgggggggctgcaggaatccaaaacccctctttgtcttcggggtttgcagtagcgtacggcgagggctaacgggtatttcgattttcttgtgatgatgtcgtaagacgatccacccaccttttgcgaatggcgccattgcgtatccggatggacgcaacggtttgtttgcgccgatcgatcgattgggattcccatggaccggtagctgagcagctgagcagagcgaaatgaacaggtccccttggctcatttcgcctcgtttgcctcgtcgcaactcgaactgcatcacgttagcaggagttgtttgcgtttcgggcaatcggacaagggacctataagaactgtcaaaccgagtacggtcaaaggggagaaagaggtcgcatacgactgatttgtactgcaggatttctcaaagctccggaatacaaacatctgccacctgtcaaaaaatatcactagctcactagggcctcatccaaacacatcgcatatattcgctcgttcgtctgcattcccgtgcatcgcattccgctcgggccaccatcaacatgatcgccgtgaccattcctacgctcggatcgagccaacccacaacgactatccatctccccttcgatcctctcttgctcagcttccttatccccctcactctgatcggactccttgctcattcctggcaccgacatgaacgacggagacagtcttccatgtctcacatgtatgacaacgagctcgacaaaaagacgcctaaggatgccttgcatgcaaagacgttgagtgagctgcggtcgaatcctgctgccaaggatgtcatcgagagcaaccaggccgctgcgtctgaacaacgacaaaaggccgaggagaaggaatacctggctgtctttcccgatctcgctactagtgccgagcgggcgactgagcaggagaggcagaggatggctcaagacaagcagctctactacaagctacagaacctggaagatcatcctggtaagtcaatcgttgatccttgatcggaagatatatccatccatccttgtcgcttacgcccgtgccgcgtcatcatcacgtcagacgccatcccggaagcccgtacgcggttgatggaactattcaaccagaccgtgtccgaggccaaaacgtcgcccaaggggaccatcatggacatccccgcttacgagcgggagaccctgagagactttttgtcgaccgcccaccaatcctcggcgactcgatacgaggcgtacatccaacggagaaaagccggcgggccgagggagatgttccctacccgcgagtacgcgcaagaatgggtcaagctggcggccgtcgtcaaatacgtcgacggaggatggctgggcggagtcctcgacatcgggtcaggaaagagcaagagtgtgggctcggatggcctacccggtggcaagttggagaggatggtgggcaagatggcctggcaggtcatctccgaggagtttggagatggcgacatcgagaagaaccacgtctacgtgtacgaaaagctgttggaccagctgcatctcggtgcaaagactgaggatggtcacacccgacctgggttcatgagggactttgatggacttgctccggatcaaggattgcccaggtgttggactgctgcaattgcacaacagtgcatcgggttgctagcttctacaagagaattcttccccgaggccatcggattcaacatggcctacgagtccttgccttaccaccttttggtcacgacgagagaactaagagaactcaagatcaacgactactactttgccctgcacgtctccatcgacaatgcggatagcggtcatgccgcgctcgctagactcgccgtcgagcgatatctcgagggagtcaaggagagagacggagaggccgccatgcagtatatgtggaagcgcgtgcaagctggttacacgcttgccgagggattgcctaccacgccttccggtccagtcaactttgaacaggtcaagcgcgaagaggatggttcgacacgctggagggctgtcatccctctcaagaccgtgccacctccgactcctctggaggacaaggtcgccgcattgatgatcaggaaatctgaagccgccgccaagatgcactgtccctctagaatgacaatcaagggtcagacgatcgagcaatggttggacccccaaacgctcactcaggaaaaagccattctcttcatccgtggaatgggggaaaagaagccctgggtcaaaccgggtgacgcggccgggagcaagttgatcaaggagctcgagtggggtggtcgtatgtttggcgcattctctaggcaggagaccgagttgatgcgccagtgggtgcggagaatgggtgacgagaagaaggaagtcgaccaggcaggcgcttacgatgcgtttgtcggcacgttcgcgccgcaaagccaaaaagaagtcaaggtgttcggcaagagtttagatggcctcgtctcgacggaccgctcggtcgacccggtggatatcgtgcgaggatgggaccttgaatccacccgaaccgacctgcaggccatgctcgatcggcctcttccttccgaagtgattaatgtctcgccgaacgcctcccatctgacactctggttcctctcgacctcgttactcgagcaattcccgctttctccgacaaaattcgccactcctttggggatgaccgtgctgcgactacttcggtcccagcttggcttcggcgcgttgcacagggaggaggatatctgcgctggtatcgacgatatcagaccagagcatgaacagggggatatgatgggcctttgggagttgggggagaagatacattcgggactttacgacgccgggcccgagatgatgcaggatataactgggttgaacgtggacggtcgaccggacctcgaaaacttttgcgccgagttgatggagcttcgaacaagaccatactcgaaccaattcgtcttgctcggactaaccctcgggttcgcgagagctcttcacgggtcgggagcgatggctagcttattggaggacgaagtagatcgagaaaccttggctcgcatcgtcgaggaggaggaagaggcgatcagcgagcatgttagacgaagacgaagaggagatggagaatcggactgggaaggggactttatcagagggtacgagcgggctattcaggctgttcagcaatgtgcttgaatgtcgtcaaacatcgactagtgccgaggagggacaagatattgaacaagctgtcaggcggtcattagcatacgttttcaaaatgggcaaaaaccccaatgtacaactcgattattatttagcaagatcatagcatatatctcgacatcgctttacacgcagctgggacttgtttcgaggcttgtttttcgacttcgctggcagctggcagagcgacttgcggacatttgagctgtttacggcgcttgttaccgcgatgacgacgaggcaggaccaaagatttgcttccggtcgccgataacctggtgacgaatcattcgcagctgaccaagtcggcgatatcaatgctaatatgctaaacataacggctgtggatggtctggccaacgttgtgtgtgtggggcgacgagcaaggcaatctccaccgttcaagtcttcagcctgaccgtttcgatcgatcggaatgggtatcgggatgcgtgtttgcaaggcgggggacgtcgtgtgtccgggatacattctcggtgactgcctcggttggacgcacgactgagactgggagtcgtcgggagcaattcggcattatccccctcccacttccctccacctcgtgacctcgtcgacgacgtttggttgtcaatcatctgctttcctgctttgcccaggttcacaaagtcgtctaccatagatagcctgaacgcagaggtatacaccttgctatatcagatcacatacccaaattgatcaaagtagcatactggaacaggaccagtcatctattcaatcaatcacatttataaccatgttggcagactttaatggcgccagtgctggccagaatgtcactcagggtgagaagcaccaaaattcgagcgggcaagacgaacaagagtccaagcagccttacatccgtggtattcaggtcagttgccgtgccattgcaggtaacgcgggtccaaatcacgacaagctgagtatcctgtatatgtgtggggctatctgcaggaccacgctttgatcggtaacctcaaggtaagtaaatggtttcgctcttgtctcaatccaccggcgctgatcaagcgtaaatcacctcgctgctcagaccgccgcccttatctcgctcgacggaagcgtcgagcaatggtgtgtcccgtactttgactctccctcggtctttgctaggtcagttgcttctcttcccgggtccttaccttttgggacgcccagatcccttctcatcgacatcaactgactcgtctcacaatatcatttacttggggtcgtgcaggatcatcgacgccaacaagggaggacactggtctatctgtcctcgatggaagttcaggactaagcagcaatacatgccccagtccaacgtgttgagcaccaagttcttgaacgatcaaggaatcggtgtcgtcaccggtgagtcctgaacggttcaactcagcatatacagaaatcgttgcagctgtgctgatcgatctggcaattcacgcttgccgtctcgtaccgcagactacctgatccctagagaagcctgcgagaactcgggtcactcggcccaccttacctggatgatccgtaaggtgcacgtcatccgtggtaaagtccccttccgcatggaatgtgccccggctttcaactactgtcgagacaagcacgagaccgtctttgaagaagacaagactgtcgcctcagaagctcgaaaccacaccgaaaaggtcctcttcaagtctaaagacctgaccatggatctccgttactttgtcgagtcagacgacgacgaggttccttgccccgagatcgccctggacaaggtcgacctcgaacgtggactcttgggagagtcgatcgtcagcgagtttgacctcgaagaaggacaaacgatcacctttctgatgagggaggctagtacgcatcagtacgcgaatgaggaccacgagaaggccgccaacccgagcgaagccagggcggccgagttgggtgtcaatctaaagaccctcgttaagggcgcttcgtacctgcgtcccgacgatgatcccatcattaccaaggtacgttcattgcgccaagggacgattcgattgctcactgggctcaccatacatacaacccgattcgatgcgaaacgatataggaactattggataagctcgaatttgcaagtattgtctcgcctggtcggtcgccttgcagtgcttggctaaccgcggagcgaaatcgtagcaaaccatgaggttttggcaaaggtggatcgggaagagcaagtacaagggtcgatggagggaagccgtccaccgatcagctttgaccttgtgagccttttccccatgctccttatcgaggaccaggatcgcatgctgagctgttcccggacgacgacaggaaaatgctggtctttgaggagactggagctgtagttgccgctcccactttcagtctgccagaggctgtcggtggacccagaaactggtaagtacgctatgtgctgtggtccaaggcggcgttactgacagctacgatgccacatcgttatgtctccagggattagtaagcctcgactaaaatttgaattccgatggccagcgactaactcgaaattggcagccgatacacctggatcagagacacgtctttcgtgctctatgccttgatccgtctcggattcaccgaagagtaggtggcccccgatgactgtatacctgcgttcgcgtggtttgattggatttggtcatagagccaacgctttcatggactttatcatgaaccgtttgcgggagagggtgagcactgacacccagactttcaaccttgacctagggtatcgacattgacactttattctccatagaactcggacggctcgcttcagatgtgagcccttagtcaatgcgagataaggagtctgagattgatctcgtctgatcagcgtctatactatccacggaggcaaggatctcaaggaagaggagctcggtcacttggctggacacaagggatctactcctgtcagaattggaaacggggctgtcgaccatctgcagctggtaagcagtcacggagtcatccgagtgtggcaaaaggctgacatgcttctcgctccacaggacatttatggagagttgatggacgccatctacctggcccaaaagttctccaagccgctcgtgcgtatcaagcaccttgcttattctgaccgtcttagcagcgctgactatcgaggcgcacgatgtttgtagagctgggaggggtgggtcgccgtccgacaagtcatcgaccacgtctgcacccaggttggcgagaaggatctcagtatttggtaagcatatcgattttgatcgtatcgtatccccttgttgacgaatgtgccaatccacagggaggttcgaggcgagatgaagaacttcttgtacagcaaggttcgtcgcctcgcggattatgccataagaagaatatatgctgacgatcgaattcccatctaggttatgatgtggtgagtaccatacccacaaatagagtaacgccatgctgatagatccttgcttaactgaagggtggccatcgaccgaggtctccgtcttgctgagaagcgaaacctgccctgccctaaccgcgtgagatggttccaagcccgtgacaatctgtacgaggagatccagagtaagggatggaagtgagttcgggacccctagttgatagccatcccggtgacgggctaatcgcgccacatccgcccacagcgcggagaagaaattctacggacagagttacgagaacctcgacgtcatggactcggccgtcttgatcatgcctttggtgttcttcacgagcgctgccgacgagcgcttcaaatctacactcgatgccattttgaagactcctgagaagggcggcctcaccgccaacaacaccgtcttccgttatgacacggaaaaggctgacgacggcgttggtggcgaagaaggagccttttccatgtgtacgctctgggccatcggtgagtaacgcctgacgacccgtcggatacccctttgagagctcatgcggccgagatgactcttgcagaggccttgagtcgtgtcgggtctttcggtaacaaggcatacctgcaaaaggctgttgagatgttcgaagacttcttgggtaagtgccgctacacggatgcagttgaaaacctctagctgacacctggcaataacctcgatccttgtgcaggctacgggtgagtccacgagtccttggacgagccgtatgtaccgtactaatctgaagtctatcctatagcaaccatgtcggtctcttcagcgaagagattagccgaggtggagagggtttgggtaagttagactgcagctcggttcttcctgctgaaatcgcctagtttacgacttcaatctaaaaacaggcaacaccccgcaagcgttcagtcacgttcaactcgtaagcatcagttagaacccagtcagaccacttcctacaggtcgccgggctaacactggtttcattttcggcatttagatctcttgtggtaggtcgcacagccggcagctgcatgtactatcggagcgcagatactgactcaacttgacgacccctagcctacaatctggaccgctgtctcgaaggtaaatggtctagcgcttgatcgccaggcccgaattccgtatatccctgaaaactacgtgaacgtttgtatctcgcatgctcccagaaggacatgcgcctagaaacccgtacattgaatcgtattccctcgcacacactattggatacattatactcgataggacagcgagaagtccgcagctgatctgcagaggttctaagacgtttcggaagaaatcgaaaatacggacgcgaaaaagaatcagagcgagactcaggcgataccaaagtggaatccgggagtctggtaataagagatgggcgcagcgtttccaagagcggcactgtcgaacgcgatctctgccggctcttgcttgactcggcgtttgcttcgtgcttgtgcgttcggaaggggtcgattgcctggatatctggcttccgggggagaggagaagctgtcatcatccacacggaaagactcgtcgccgttgccctcgtagtcatcgcttgagaaatagcccatgccggaatgaccaccgtgagagtctggcaagtccgggcgctcgtgcgtctgatgggcgggcaaacaccggatcaatattgaggagcaagtcatccgtatgagaggaacttaccctaacatgacgtcgcatattcgacaagactgagaacctctttccacagatgagaataggacattgaaaggctgtacgcgagaaccgaattggttttatatgtcaacacttgatacgttcgatctctcaataagcgcgcgaaggcatgctcacgtttcgcaccggtatggacagcttgatgagtttgtaacgctgaaggtcttgcgaaaatcttgtggcatgtcggacatcggtgctctttaattggtttggtcgtcgtcgaggagcgtctgactgtcggtcttccctcctgaccgaaatgggtttcgtattgaccgataaagacgtcgctgttcatcgccggccatggtcgacgggaaattttgtctccggctgatggcgaactcggagccaagtcttgctcatcgctcagcatactggtcgggataggaaggacaaagtggggtttcgccgaaacgccgggcaattgacgcgtagggaggtgtttgaatttgccgctcatcggcgcgctgctcggagttgtcaacagatgcgcaggccgtctgctcgcgggcgtcggtgtggcgtaaacatggcgcgatgtcgccggcagcaacggtggtgtcgcttcgaaatgccaggacggaggcgattcgaaactgttcttgatgtgaaaccccatcgtggggtacgagaatacatgccggcctgtcgatggtgtcatggcggtcgtgtaggccacggtcgaggtcgacgacagaggtggcgggtggcgggcgtcccaagattggccgaattgggtttgaccaagctgttgcctacgatttggaatcggtacgggagtcgaaggcatcatcccctgatagctctctggaggatggtacgacccttgacgttcgtccatcgtgatcgacatgcccggaaacatggcttgcggggcgtcgagactgcttcctatcttggagtcgttcgaatcactgggttgatgaccacgtgtcgccgaggtttggtacctcgtgataccgaacgagttgtttccaaagacgggttggatggtctgttcccgaaaaggtggccgttgtgcaggtgaactcgaaaagtcgtcgaattcgccaccgggtatgatgtgatccgtccctgactgttgcctgtaaccgccaccaaaggaccgtcctatagaggatggataggaagtcgacattgattggaaccctccgatttggggcgactcccgagattgaggtatcttgaacatgaattgagaggggaagggtggggaagagatcgccgctaccaagtcagagtcccgtcgtcagctcgagtcttgcctcgaattggttctcagtcgtcactcaccttgatcctaggcgcgacgagaccagcgatcaagtctcgcttaagagggatcgccgagacacaggtgattccgtagtcgtgctgatcagatcagatccaagaaccgaagatgatcagcctcgttttcttttgaagggtaaacaaagatcctctggcgggtctccgatcacatcacactcgtggctatatacgacgtcgtccacctcgtgtgcgatatcgatgattaccgagcgggaggtaggtcaggatgaccgaacacctttgcgctcgatgaaaaggcctttgaccgagtgtgcccctttcataaccatgccgtcgagcttgggtcaaaggatgaagcggagcattactctctcggacctccccgcggtgtgaccctctcgataagactagcgaagcggagaggcgatcggaaacaaggggaagggagggggatagcgagacatagtatgaccaactcactcttgtactggagaggcacaacccgactaagatctcctctcaggtaacctttcgttattccgctggtcgggtaggaacgcgacgacatttgtttgagggaagcatggcaaatgtggtggcgaagttgcatgaaagacggtttccaggacagactaatgatcagtctcgtgtttgaccatatcgtgattcggtactcacatctaggtcgacgtcgaatatgaatgaacctatggcgtatcgtgctgatcgcgtttccgccttcgtttcggatatgctcccttgaatgtgaatgtctcgccacgtcgagcggggaatgatgatgatgatgatgatacgcgtaatcgtaatcgagatcttcttcctttctttgatttgattgcaacccgacgtcgaagatgatcggacctaatatgttgtgcgggatagaagctgatggagtgatgttggtttcgaatatctagcaagtcgatcgttcgtctgaattgaacaatggaggcgagggaagattgtcgaaagagattcggggtcggttggtgatgacgatgaatgtcgctgatatatctcttttgctctttcccaaaggtacgtctccgattcgtttgacccgacaatccgaacgaagatgattagaagatgacccaccagcggaaaacccggagacgtctctattttgcttctttgggcgaatgtccacctggatcgtccctttggattttcagacgatgattggtcagggatcaggttcagcaaagagcacagcgttggttcgatagatgccggaaagtaggtaatgatccgctaatgatcgaaaggtagacgaaaatccaaagggaagggagcgcagggtcgaacgtgatcaggacggcccgaactatatagacaggtatcgccagcgcagcgactcgacgtacaaagatccgcttttcttcacagtcagcctggtattgaagaacaataccgtctagcaggaggtcacctcgagacttccgaaatccagttgttcaaggtgacaaagacggtcttgcgcgtctcgagtatcacgtccaaaaaattcaaaggacccttcgcttgcccgaattctcgccaagtacccttttgtatactccccccaagcgatgaacaactcggccaacaccggatccacctcgactgaacagtacccctcgtgctcagcagatcagttttgatctgacgaacgaggggttttacccgaaacgcattccaaagatctcttgcttgaagcttatcatcatactttcttgatctcatgaaaaatgggtcgtcttgtcgcatcgtgtcatcgtcatcggcccagcgccatgtgtcccgttcggcccgaaactccgggaccggaatatcatcgggtcactcgatcacccggatggaagatgaagatcaagtggacagcgcgaatgatgaccttcgctgcttgttttggtacgcgttacaaggtggatcttgttcttcttccggatctggtctcacactgaaacgccagagcgcccgtccgagctatttgaccgaccgttgtagaaagaaaagcttgctctcttattgagctctgtctgtgtcggtgggttgtagtttgagaccctgccgtgtgagatctcatgaagtcatcgtcaaattcctcatggactcggtacgtgatggttttaaacctaattcgaaggatgacccgcgtggtagcaaaggagtaagaaccgacgagccgtttgacgtgatgccttgtccccgccttctcggccttgtcctcttctcgcatcaccgaaaagaacgccgaacccgttccctctttcttctctgtgtaaacgtccagaaggaatctcacggtcgtacccgatcacggacggcgggatccctatcttccacccgagacctcttttcccacgggggtcgttcgacttgaaactcgaatcaggtcgcggaagctgatccgcaaggtgtgaatttcccgcgagctcggtgttctggccggcaatacgaggaggaaatggttcgggccgatccacgtttgtcgatcgacgtcgtgactttatagagatcggtgccggataggcacaaggcagctcggcgcggccggcgaattggtcagagttcgaggtgagcgcgatgaccacgttggatggtattgcacgaacgagagctatcccgccatcgggaacacaagcctaccagaaacgcggcgtcaccctccaacagatcgcgtcttgagagcattggcccacggaactcgagccaattccttcagccaatagtccaagatgacatcgccttgactgaagcacaagagcaaggctacttgggccgcttcaatatgtcgtccagttcatttaatccaagtcgactttcaaccaataccaagcggtcaagcgtactgatgacatctgtgttggacaagagtttggctgatgcagttgtgcagcgccagagcgccagacaacccggaatggtggggctatcagtatgagaggggatgacagcatgcgtcatcaccgacgtgtgtaacatcctacgctgattatcaattttctgagcggatcatttgagtctcatagcctatcaacgggttcgtcagcggtcggccatgtaccgtatctgcgacacctgaagtgaggagatcaacgcttaatgccggcaaggatcgtgaagacccgccaacggactgatcaggtgcgagaggccgcgctgccattcgggagctactcgtgaacgggaatgagcgatgtcatcgcatatatatagtattaaacatgcctatctgcggcatctcaagagtccgccgcggaccccttgaggatccgctcgacgtccgagatcctaatctgctagaaaaagtcgactagacagagagggagaaagagagaaaaaagaactggcacccaagagacggaaaaagaaggattttcgggaaagaaaagtcgttggtccgcgcatgcaatcgatgtctatgtcggtgtggtttgtagatgttttttttttttttttctcgcgcgcaacgcgatgatcgcagacgatcggcgaaacagcgagccgaggcatgaacaaggaatgctctactccttggatccgtaaacgtcggacctcttgacaccacctgcacccttctggacgctgtaagagggagaaagtgggtggtgatggacgacgcgacgtcgatcagcctcggaaaccagatgaccaggggcgaaacccccgccccgcccttccggacgtcctcgtcgactcacttggcgttggcccatgccttgagacggatggccgagaccgagatgaaaccggtcgtctcgctgggttcgaacccgcccatctcgtccatgctggaaaacttttcgtcatacagaccctcgtccgacgacctgccctcgacgacgcagtttcccttgtagagcttgagcttgacctgtccgttgacggtcctctgactggcggggatggcggcggtgaggaactctcgttcagggctgaaaaagtagccattgtacaagatcctggagagctcgatcgtgatgaactgatcacggagcgcacggacgttcctgtccaaggtcataccctcgaggtccatgtgagcgaccctgaggatggtggcaccgggcgactcgtaacaacccctcgactttacaccgatgaatcggttctcgacaatgtcgaccctaccgatcccgtgcttcctggcgagcgcgttgagttgcaaaaagatctcgacggcgtcggtgtagacggctccggtaccggggacggtgacctttgtagggagacctcgcttgaactcgacgaggatctgctcgggttcgttgggggcgtgttcgggggaagcggtcaacttccacatgtcggcgggaggggtggtgttggggtcctcgaggatcccggcctcgtaagagatgtggaacaggttctcgtcggtcgaccagggtttggcggcggtctgaacgacgggaacaccgtgctgggcggcgtactcgaggagggccgatcgaccggggaatcggtcgtagaactctgtgtcgtgatcgccgtgacgtacggcggggtcagcggggacctttgtggtgcggagcgaaactggactcaccaggcaacctccagggagcaatgaccttgatggtaggcttcaatccgtaaaaggcgagctcgaacctgacctgatcgttgccctttccggtacaaccgtgcgagacgtaactatccacccgtacgcccgacaagttcagtcctggtcagcgtcctttccctctctctctctcaccagacttttccccactctgcctcgaaggcaacttccataggctgtgacgccgaggaggagcgggggagatggacgagggaaaaaaaaggtgactcactcgcaagcctccctctcggcgacttcgatcatgcctcgggcgatgacgggcctagcgagcgaggttccgaggaggtagactccctcgtagatggcgttgcactggacggcagctgtaggtcggggcggggtggggcgggacaagggggcagagaaacatcacccgtggacatttcacacggcagtgaagtcaagtgaagtgaaacccgggcagggaaagaagagagacaaagtgaatttccccttatcagctcctccgtcttcctcgctagcagcgcacggacgcttcgggaacgggatgatactcgcgataaatcaactcttcgacaaactccctcttcaagtcctccaggaagaactttttggctccaatcttcaaggctttctctctggcggtttcgaaatcttcttcctgaccgacgtcggccataaaggcgtagacctcgtaaccctgctcgatgagccagacgaggatacacgaggtgtctatcgtatcggtggggtggggtggggtggggtggggtatcgttgcaccaaatttcagaggagagttgatggtggtatgatggtgatgattcggaggtgtcagtcagtgatacatatcatgacaacgtgtacatgtcagaagagggaagacggagggagaggagggggggactcaccgagacctccagagtaggcgaggaggactcggcccttcttgtctccagtagcgacggtggacatgatgatggtgatgattgacgacgggttttttgtttggcgggtcgaggtggttgattttctttcgggtttgtcaagtgtcgtatagcttggattagctattgatgagtgcgtgtgggtttggtttttgcgagtctttctgagtttaccagtgagcgaatggacagttgtcatggatgatcgatgatatatttccgagtgggtaggtaggcggatggatggatggatggatggatggatggatggatggtggtggggtggaatggtcgttgggtgggtgcgggtgtgactcggtgtgcttgcgctgcttggctgctcgggagtatcgcgcccgaaaactcgagactagctcttccagctgcccctgctctgccccaatcagagcgaaaacgtcgggagagatgggggagaagggggagactcaacgtggagactccacaattaccatcatcaacgatgagcgacgaccagataagaaaggatgggggggcaaggcatgttatcgcacgacctaaagtctgtagcacacggccgactggaatacaacaacgtcgatcgagtatcattcgtctgccatggcccatggttaacctaccactactaccctgacatggcgtcaaggtgtagagcaagttcatggccaagcctgtcaacgcgcatgagcaggtcgcgaccggcccctgagatatcttttccttcgggcgatcgggtgagtaccccgaacacaatccccctaaccgccaaccgcccactccgacctcgccgcacaccgcaaaactgcagaccatgaacctcgtatcaagtcgtccaagaacaacatcatgtcctcgactgcgttccgaacgacctagcgttcgaaagtactcgagtagtttcccaacatttatgggtcctaccaagttcaacctcgaccacctacctaccttcctacctcacttcttctaacctcgaagctgacgtcgacttacggaagtaaatattcggacgcaaataatcatcacctacaacgtctggtcgtggtcgtgcttgtattctttgtcagatcatctagtcatatttttccttctcacacctaacgcctgacgatcatctccccacctcgactcgcaaaccagaactttccgcactccatattccgggcgtgcacccgacttccttaagatggacacccgtcctacctcgccttcccgttcaccgccttcccccggtcccggttactcgcatacgagagcccgggcgacgtctcagtcggataccaccaaggctataaacggggcgagcaagttgtctatatcgacgggacctcgggggagggcggtggacgaggaagaatcgggttcgggggagggctcagggtcggggtcgacagatggtttgcgacgggtcgatcacctgggatctgactgggttggaccaaaggatgtcccctttcctaattctcgatcgactacgccgacaccgagaccgaccccggtaccttcttcttcgaggaggaacagccgggtattgtcaacttccatggacgtgcaggacgatcggaggatgaactggggcgattacgatcacgacaggaccacccgtaccagctcttcactccccacgtcgagtccgttccacgggatggaaacccggtcgaacgacctcctcagagtccccgccgtatctttgactcgaaagacgacggatcagcgcggtccggcaaacggggagaggagacgatcgtctacgagtcatatccccatggtcgggacgtcctccttttaccgcaacgtcgcatctagcagctctgcttcgtttacccactacaatggccccaacaatggcagccaacacgacggtcatgctggtcaccaggatattcccattcggcatgcagactcgggcggagaagggatcagccctcgatggtggaacggccggacgacgagttactctcgttcccctacgatcccccacccgtccggaccgggaagtgtcggtcgaccttcttctcccggtccgtcgggtccggggatgtacgggcatggtcagggaagaccgttacccccttcgaggacgaccacggcctcgacctcggggttgttcaccggtccccctgggataccaccaggaggatcaggaagatcttcccctacgttcggcggttcacatgcgggtgggtctgggaatatggtgtttcgggattcgccagcgacctatgggccggcgatggggaccaccccgacgactggaggggggatggacggggtcgggagttacgagttcgacccgtccactttcgacgctcgacgacatcctttcccacccgtctcgaacgccgggaacatcccgtcatcgtcgtcggcttcccacctgccaaccagcatggtaggtgggcacggacgtcgtggtgatagggtcagcaggatctccgaagtggtcgaaccggattccccgcgcgtgcgagggtgggatcgacaaaggagcagcgaggcgagtacgattgaagaggacgagccgtgggacgtctttcgggaggtcgagagggaaagggagagggtcgtgtctcctccttccatcgcgtacgttcatgcccactcatccgccatccgttcgaacggggctgaccccgaccatgtcataccgttcgcagtcatctcgtcccaccgttgacgtcgtccctgacctcgctctcgctggcattgacgacccgccaacgatccattcaacacacgttacaagagtacaagtccctcgccgaacggttcctccagctcgacgacgagatcatcgatggcgtcctcggctcgctagtactcggaatcgggtccgctactagacatggggataaagtcatgtctccctcttcgtctggccagccgacgggcagtgatcaaacgaatacgggacagggcaatgaacctcccgccgtcgacgcgcataccaacttgtccgtctttctgcggacgatcgagcagaccagatcggcagtggatggcctcgagggttcgttgcgggaaaaagaatcggtgatgcacggggtggaagatgaattggcgaggttggtcccccaaatcgtgagtctgagggtatcaacccgacccgacccgacgacgggctgatgagtcgttcggaacgtcctgctcgtaccgtcggctcatcattttgcgatcccttggaatcacgctcggctcgattagctctctgaactggatcgccggatcgaagaccgccggacatcgatcgagcgggttcaagcggaacgtcttcgacgagagagtaagctggacccgtcgatctcttgagtcgagctacgctgacgctacattccacgcgtgttgtctgtgtggcgatcacgacgttcagggatcatctttatcggatccatcgtcgggtcggtcttggtcctcttgtgtgggatgatgggcatgtggtatacccgttcgacgttgccttcaccgtcgtcgtcgtcgtcatcgtcgtcgtcgaaatttacatcccaacattcaacgtaatactgtatcttcataatttgcttccgagcacgaattctcggttaatgacgtccgggacaaccggcaatgcgcggccgagatggattcaggagaggtcgagagaggttgtcgaaccacgatacaatgacctggggtcaggtcgagggaccaccacgggggtcagtgtcagtcagtctattcagggggtagacgaggatggatggatggatgtactccggggactgtttgaacgccgcggccgaccatataacaatcaataggagttgcacaatatcccccccccccttccctccctcgctttgtgttttccggttaatcacgagtcgaatcaatcccgggcaataccaagtgtgacgttgaccagcaggtacataataccatcgacctctagccgggtataacatcttcgtaccaacgaccccatcacacctgcctagtctgaacactctagtacgacgcccccatcgagtcatgtcattcagagcgaccaagacgattcgagcagtagcacaaagggtgagccgatccgctgcgacccgagcgtggtctgacccgtgctgaccctacctcccttgcacaacagcccaccatcatcgcacgaaccaccatggcacccaagaccagcgtccagcagcaacgacgtgctcgaacgagctccgcccccgccgagtccaactccaactcgtcgcccaaacccctctacgcatcgcaacaccttctcccacacctccccgtaccctcgctcagctcgacgttcaacaagtacctcgagacgcttcaacctcacttggaccaagcgggtctttccaggaacacgtctcacgtcaaagagtttctccaatcacccctcagctcgaccctccaggcccggctggaagcacgtgcgagcgagagggaatcgtggttgagcgaatggtggaacgaagccgcctacatgtcttaccgggattccatcgtgcccaacgtcaactacttttacctgcaccgtcaaggtctggcaaagggcgcttcccagacccgtcgagcggctgaactggtccgcggcgcgaggatctttagggacttggtcaccaccgagaaactcgaaccggaatccatcaagtcgaaacccctcgacgcgtccgcctacccggccttgttcaacgcttcgaggatcccgaccaagccgagcgacacgttcgagatttaccctgcgggagaaaacgagcacgtcgtcgtcctgcgaaaagaccggctcttcaaggtacagaccaaggggcttggcgtcggtgacctcgagggggctttccagcaggtcatcaagctcgccgacgctgccgagggtcaagccatctcgatcggaacgttgaccggggaagaccgtgacgtgtggaccgaggcccgtgatcacctcgtcagcctgtcacccaagaacgccgagatcctgaagacggtgcaagcggccatcgtgctcgtcaacctcgacgacacggtacccgccgaggggagggaagggaggagctggaacttgtacaccggggatggcacgccaggcaggaacaggtggttcgacaagcacgagtttgtcgtcgatcccaagggcgagtcgggtttcaacggagaacgtgagtcctagccttgcccgctcgacacgtgatcaagtcgactgagaccccttccccaatggcccgacgatagactcgatgttggacggtacgcctaccttgcgcatgaacgaattcgtcctcgccgcgctcgagaacggcaagatcccgcttgacctcgccgaaggtgaacggccgggtaaagtacaggtcgaaccgttggaattcgtcgtcgacgacaaggtgcacgaattcgtcaagaaggctcagaagaactttgcggattcgctcagtcgacacgatctcaaggtgcgtgccttgctgcctgcctcgagtacaccatggggccgcgattcgatgatctggactgacgtcgcgattcaccgttttcacaggtcgtgcaattcgagcaatacggcaaggacgcgatcaagaagcacaaggtctctcccgatgcctgggttcaaatggtcaaacagctcgcctatggcaagatgaccggagggaaacccgccgtgacctacgaaagcgcgcagacgagaaagttcaggttgggaaggaccgaggtcatcagatctgccagcgcgcagagcaaggcgtttgtcgacgccatgctggaccccaatggatccgacgtcgagcgggccaagctgttccgagccgccgcgggtcggcatattcagtacgccacctgggccgccgacggtcaaggtgtcgataggcacatgtttggtctcaagaaactgttgcgaaagggtgaagagatgcccgaggttttcaaggacgaggcgtttgcattgtcgtcgacatggacgttgagcacgagcaacttgacgagcgagtacctcgacaattgggggtgagtttgacggcgtcgtttttgacaaaccgtgagacaagtcttactgatcccatattcgacccggtcccagatacggacaagtcgtaagcgaaggattcggactctcgtactcgatctcggaccactgccttagatggtcgatcatgaccacaaccggcaaggctgacgagctcaagaagaacttgatatgggccgccgaagaactgcgcaagaccatggacaacgccgccaagagcgatcaggctggagcacccaaggccaagctgtaacaccgtcgccgacagaacagagacatcgacgatgggcagcacttgttgtatggtcacatgaccgattctatattgcatatgacagatggtcaaacatatcatcgtaaagagagaatttcagcggcacgtcggcgctgcgcatgagatgtgaggaacatgatggtcaaggattacttggctggacggttcgtaattgatcggtcgtgtgggagtgaaagaggggggaaaagcgctcttcgcctcatttcttggccttcctagcgtttcctgcggggcctccagtgcgagaagacttggcggactctttggtctttttagccgccacggtcatccaaccgtccggagacgaggtcatagacgcagccttggtcgcttcttgagtcgtctcggctgtcgcagtggaggtacttcctcgagatcggccgacaccacctcgtcttccgcgtcttctaggaggcgcttcggtcgtgctaggtcccgtttcagctcgaggggggctgggtttcttggctagagatgcagaagaggatctggtagtattggtcgattttacctgttccggcgacgtgctagctttgcttttgtttgatcggcgggtcttggcgagggcgttggataatggcgaaggagagatatcttgcaagccaagcgcatcccagccgccatcctctcgatcctcttcgggccaagatccgcccaggcaggggaacgatgacgaccgtgaactctgccatctagccaatggcgtatcgatatcttcactcggtatggacgacccatttgttatgggacttagcagttgcagattggatggtcctggagagaatacagacgtcgaaggcgtagcgggtggaggcccgtccgaaactggcacatcctgctcgtctccattcagaatctcgaccggtcccgttgagagctcgctccattggtctaggtagcgcagtccggaatgttcgaactccaccgtcattagacctcccttttttcggcactcggcttgaacacgttccaagaccctttgccttctctaccgatccactcgaggcgttccaagcgtggcaacttgcgcgcaaacttttttatctctttcgaagccgggatggtgctgtctggtgcctgcaggaattcagccagctcaattggtagagtttcaagcgtgctctcggatacatcgggcttcgcagcagccttgttgagcggagccatcttggtagtcctcccgcagactttggtggcgtccatctcccaacacaggtcaaccttgggcacgaaagagacgcgaaggcgctcgagctttgacgtcgaagggaaaaccgtagccgtgacctaccataaccacagaatcggttcatcctgtgacgtcgaccatcttgtggaacggccacttaccaatcgatacatgggaaaatccaatctgaccgtcaactcttccaattcaggcaacgtcttgaccaatttagtaagcctctcttcatcgatttcccaccaatccaggttgagcgttgtcaatgcgttccccttgtccaagatggcttgatatatctcttccggaatcggctgagaacgacacaggtcgttgactttgggagtctggatcgacgtgtccgtattcttgagcgcaggcaagaacggcatggccgccgccacgggtatggagcgagtaagctcaaggatagaaagtctctcgatcggaagatgaggcaacgatgataagtgatcgagtgtccacctgcatgtgctcttgtaagcattgtagctcagacattttagtatcgcatatctgcactgacgaatgatgagtcccgctttcggggattgcggcgcgaaacgccttcagtccttccggatactcttcgatgtctttccaaagggtcttggcgagccgacctggcaatcgaatcgaattggtcttcgatatttacgtcaaagacgagggagcgctacgcaccttcaacaccatccagttcgaggctggtcaatccaacacacccttcaacaatctccttcactgctgcagtggacaatttggtgccccgcgttccgagcgtaagggtttgtaaaacaccacagctaccgatcgcagcaatggcattgcagagcgtcgagtccagaaacaaggtatgcaccgccaattcaactagtggcgccgcggggacggtttcgctcaggttgcacaagtggttggccagattctttgtctgaagtagggtatcacaatgagctcgacagacgcggcagcggcaaggtttcaaaccatcactcacgccgatctgactgagattatcgagcctcagtcgcttcaaacccttgcctagacctcgatcgccatcgaccacatcctctcgactccagtcagtcccggctatcccgcccttgacatgctcaacttcgttttcatgccaaacaagcggcttgatgaagaatggcgtgtatctccctccggaggaagggttcgttccgacttccacgggtctcaaaacgttcgggagtggtaaaggcgggcaagctagatccaggctggacaggtccgggagagaaacaaccgcctgctccccgcgatcgggaaaatgagtacgaatctctctcgaatgggtgggaagagcttatgacaactcacctgccagacttcgttactcatccccgtccacgaacctaaatctactgccaaatccctgcgctcgtctagcttgttcttgaggttcgtatcccccgcaacttgtcctttggcccgcttgatctcagcgtctctgctcatggttcgcgctccccggatccctctcagaaatcgtaagagctgctcattctgagcttccttccctgttcctggcatgcgcaccggtatggtggatgcatccctcaagctgagagtctgtggctctttttgaacagtgcgaagggcgatctcttgcgcggtaggaggtctgatgatgatgcgtcgaaacctgatataatcctcttcggtcctgtgtcaacgcaagcggacgaagaggccgtggatttcagtaccgtcgtgcgtcgatttggcttatcacaaggagaggcacgagaaaaactattctgtatgactcacacgtcctccactggaacgaccttgacctgtcctttctccgcatcccaaaaattgcactctaccttgccgccccggtgcatatctacgttcgagtgcacttccccttccggctcttgctcgttgacaccgagatccccccgatcgtgcttgctcgtaagcttattcggatccactgggaggcgctcttgactcgtcctcacttccccctggaggacgagctcgaccgtcccacctctcatcatccggacgagtctcctggcgtgtttgttcagccgggaaagagtctcgggtagtgccggagctgatgaggtatcaaggaggtgcgggaggacgactgttccgtcgtggtcgagtattgcggtcaaggatcgatatcagcgatcgtcctcgatttcaaaccgtagccacgccgtcaaaggcacagaatcggaaaaagaagagaagtgacgtagtactgatgttgacttactattcaggagattctccactctgtttccatgttcaatcatctttcctctcgtcgtccgtcaatttgggatagagtcggtccaagtcggacgttgagggaatgatggacaccttgcgcgtcgatccgtccgcctgtctcggtctgatgtcgatgccggcccgtcctttccgggaggtcaatttttcgtcttcaaacctaggaaaccggcgagtcgaggtgaagtgggaggttccagttccgaaggtacgatatcgagcttctcagttgagctgactatgtcgagctactgaatccgccgagccgatcctgtgcaaacactcggtcgagctaccggccagaccgtgcgggttgcgagagtcagttgccgcgtgtctgcgatcaataagaagttatcttttcactgagatttctcgttggactagcgattgagggattatggtatcagacagtagaagaggtcgattgaggctgcgcacggtcgttattggttgtctttgaacgtaggcaacgacgcgcttgggaacagagcacgggcccaggtgaacgagtcgcgatgatcgcgataaatcaacaaactgatcatcaagacgatcaaataatttggtcaccatgcattatgatcaatcatacgaccggcatgaccaggagcggaacaacgcatcacgccatggcactcgcactcgcactcgggctctctcgtctattggcctccgtgtcccaacagatgtcgaatagcttagtttgcatgtgccatgggcttcgctattcagctcgacctaaatgctgattcatcgctgtagaccttcatcacctctcatcatctcatcttgcctaccaaaggaactcgactgtttcccatcaaatcgatcgtcgtccgtcgtcgaggcgccaccgatttcagcgaaacggggcggggcgagaagcgagcgaaagatgacgaccggatctaaatcttatttccatcttttgtttaatccggaagtaaatttacggcatcatcatcatcacgattcgagcgatgtttgtttacctttcgatagctcgatagttgagcaagatcagaccaagaaggtccaaggccgtccagcaacttgatgaaccccccactcctgtctgggcaacagcaccgtcccatccaagacacccaacctcgacatgtcggccgaccacactccggattcgctattcgactcgttctcccaagatgggactccctaccgcccgatacccactcacacacccgtcgtccgacgcagctcgaccgcgtcctcttcttcctcccaccagccaacatccggcgtcgacgcacccgtgcgacaacatccgagggactcggactcttacgagaacgggactttgtatcctgttcctacttcagcccagccttttcctgtgaccgaggggtaccgcgatgattggtattatcgtacccacgtccggccgatcgaagaacggatccgagctcgggcggaacgatcgaggctcaatgacgaacaggccgctcaggacgaagtcgagctcggggcagccgtgccaactgatccggatggtgatccccagagacgcaagccgaggagagagaagaggcggggtgggacgaggaggggagatgacgaaggagagttggatgagctggacgagttgttcgagatcccccgtgctcgtacccgggatcgttcggatcaggtcgatcggaggggaacagggaaggggaaccggaatatggacgagaaagtcggcggtaagatgggtcggaaaggtagaggcaaagggaaaagcctcggcgtcggggtcgggggtacggggatgagaccgttcgaggatgatccttcactacgttccgaccggagcatgggttcagactcggacgtcgaatcggactctgtggatctggatgaggacgaccgaggcaatgccttcgagtcgggttcagaaggggacgcgtcgaaaaagcagatggaagcagacgtcctcgaatccatcggactgtcgtccacggcttctacgcatcacgatcatgatcgacccggacatgcccatggcgagtcgtcaacggcagtgaaacgcgcgggtctgaggacgagagaacccggatggaaaggaccgagggaagcacgggcgctcaagcatggtccgatcggtggtccatttgatccaggtacgtccacccagagcttcatcacctcgttctggccaaggcaagacgtctcgagatcgctactgactcggtaaatccctcctgataccaaacgtgccaccccgtacacccttttgaccacctcgtagacaatcccaaccccgatcttcagacgctacatgacatcaccacccacactctccgctcgacagcctttctctacgccgacgggccatacgcttcaggatctcccgcgggtctcttcccgtccagtctcggagcgtcgagcaagctggggtacgtcgccgcgggtggggttgggcgatcgatgcacgggcagggtggatggggagggcctcgacctccgggggttgggggaatatacggggacgactttgagggagatgaacggggaaaggattcgatgtggattagcacggggggcaagaccgggacgacatctcgtctgaacgtctcgtgtgggcagaaagtcgtggtcgaggtcaggggccgtggtcatcatcgtcaaagtcaagagtaaagtcaaagtcgggcatcggaacgggattcacccggacgatatcacatggaaccccgcccaatcagtaccaacaaccaaaatcaggacgaggatcacaatcactctctgccaaccccccggacgacggacgacccccgtgtagaacgagcgaggtttcgacccttatcgacccggaccttgtcgcacaggatctcttgtcgaggccttcctcgatatagtcagagggagggatgatggagtggtaatgagaggtgtacaacgaatcaccatcaccaacgctttcactaccatcacaccacggacgatgctatcgtatcacgagccaaagaggggacaggtcgacaggctcgtaacggcgctctgaacgtccatccactttcgtctcccggcacgatccgacaaatagggtctacccggccggagatgtccatatcaaccggatgtggtggaataatcataatcgggcacatgtcgataacacttggacatccgacagacaatgattcgacctgtcgatttgggggtggacctttcctttcggactcgacctgtcctgacgatggacgatcaagaggatatctcggggacgacttcgacgacctcgacgatcttgaccttgaccttgacgatgatgaccatgacccacgcctacaaggacttttgacaacccccgcatccatcttcctttcccgtcctctttatgcatctcgccgaaaagcgtcccccccccctttgccccgctagcctgatcaccgatcgctttctcgctccgatcacgaactgacccacattttcccgaccctcccgacgtcacaggctgattccggatttaccgaccccaccgaggccgccgagttgaagaggaagcgtaccttcaaaaagtacacttaccgaggtgtcgagctcgacaagctcttggacttgaagaacgaggagtttatcgacgtgagtctcgtcgtcgtcgtcgcatttgccccacgcctaccaccgggcagacgctgacccacgtccaccgcccacagctcgtccacgcccgtgccaggagaaggttccagcgaggtctcaagcgcaagcctttgggattgatcaagaagctccgaaaggccaagaaggaggccgctcccaacgaaaagcccgctaccgtcaagacccacttgcgagacatgatcatcgtccccgagatgatcggaagcgtttgcggtgtttacgtgagttcggaggcggtcgactaaacgatgcgattggcccggctgacgcgatcgtccccccctcgtgtgtgtgtgcgagcagaacggaaagtcgttcaccaccgtcgagatcaagcccgagatgaccggacactacctcggagagttctccatcacctacaagcccgtcggacacggtagggccggtctcggtgccaccgccgccaggttcattcccctcaagtagacgcgcgcgctcccgccgtggatgcttgtgtggatatggtgtttgttcttggactcggaggcaggacggacggatggggggtgtaatgaagatcacgcacgccagaacgatatccgaggacgaatgggtgtttgtcattcgggggacttcatttctcttctgcgcttgatgcccctcttgctgtagagacccgatgatgacatgtttcgttctcgcccccaacttcccgatggtcgaccatggtgtgtggtcgctgtgcacgttgaacgtcatgtataggcggttcattgtcgagtggcgagtggagtgtgcttgtgtgcttttgcgttgataaatgtcactttttcggtcttgaccgctgttttcgcggcggcggcggcacatggaacgagaggttatcatgtgtgcatctacgtgattacacctaccacctacactatcgtactatgctcggtacccacgtccagttcgtacgtcgatatagctgatcgatagcttacgagtttcgtcaccggtcgttttatattccattgtgtctgacggacaagcttgaacaaattaaagaaaggagtcgaaagccgacggtcctgttccaaaactcgaacatcggacctccatcttccacccttcggtcaaacacgatcgacccgttattgacgacggtatagccacgacgacaagccgatcgcgacggcaatatagatctcggtgcaccgacgtggacctgatctggctggaaacgaaatgaccaccggacctgctgccgatacatactcctacggcacactgactccacccgcccagcggaccccgtcgaaagctagacaacaaaggcaatcgtcatcattggcaccatctgcattcgatactccgaccagccgttcaggaggtatgcacagtaggacagcctacgaagccgcagggtcggacgaggacgacgaggtcttgaagggggaaggagagtttagcgaggatgtggacgaccgcaccatttggatgaggaatggaaggcagggcaaggcgactgtagcgagttgcgtgagcaagtgagtctgatggtttgggcggagtagctggtatctgtatcgttaggctgacgcttgccctcaccagtcttgccaacaccatcataggatctggagcgctggctttcccatcggtaggtacacatctcaacttgaccccgcctgacctgtcgctcatccggttacaccaccatcacaggtctttgcctcgatgggtctgataccagccttcttctcgtgcattttcgccggagcgtgctccgcattcggactctacctcctgtcactctgcgcacgtcaagtcggtcgaccggtcaaccaacccgcaaccgcattctcctcctccggacccaacactcccgcaaaacacacccctctccgacaaagagaaggcggcgacgaggatgacttggcagacttgtcattcgcccggacgatcgtctcgagggtgaattacgagaaaccagaggcgagtttcaatcaggtggccaggttgacttttggggaagggtgggcgacgaggtgtttcgatgccgccatcgctatcaagtgtttcggagtcagcgtcagctacctcatcatcgtcaaggtacgcgcaggttcccaagtcgtccaagtcgaaaggccgaatacgtacatcagctgacgagatcacacgcactccccttgcccattgcagacgctcatgccccaggtcattctctcgctttcgcaccacttgcctagcgagacacttccggaagattcgatgtggctcgatggccgtctatggctgctgttctccctcgtcatcgtcggacctctgagctacttgaggaggatggatagtctcaggtttaccagccagatcgccctgttgagcgtcgtctagtatgttgtcggtcgggtctcgatggagcggattcgaactgaccgggcttgttggcgacgtctagcctcgtcatcattgtcgttggatggtgggccttcgacgtccccactggcaagaagcgtggacccgtggttctcggcaggtttgggggttcgaccttgggctcgttccccatccagattttcgcctacacatgtgcacaaaacgtaagccccggttcccgtcgtctatgactgtggtggatttcgctgacggattgctcacacccgtaaagatctttgcctgtttcaacgagctcaaattcaatactcagcctaggatgaacaaggtcatcgctacctcgatcgggtcggccgctattacctacgaagtcgtacgtccgcacgaggctaagccaatcgcatatggcttgatattgagaagggctcatcgaacattacagctcggaattgtcgggtatcttacctttggacaaggcgtcagtagcaacgtcattgccatgtgagtaggaggggacttgccaatctcttggtgtcaggcggctaaaactgacagagtcctcgtaggtatccctggacttcggtcatcatcgccattggtcgcctcggaatcgtcctactctcggctctatcgtacccgttgcaggcccatccttgccgagcctgcgtacataccctcaccgccgggcttcgcaagaagggcgtctccggtgacgagagtgtcactgccgaggaggatacggatgaagaggacgagctgatggacaaggacgaccatggtctacccgtcggcaaaccgatgggtcagaaaaagttcctgggcatcaccacggggatcatcttttttggtttcgcaatcgctatggtcatcgacgagctcgagacgggtcagtctgccattgagctgtgacagttgatcgagttgctgaaagtctccccttgcagtcctgagcttcgttggttccactggatcgacgatcatatccttcattctgcctgggatgttctacttttccctcttccgacacgagcacggtgtcacgaagtggatggctttgaccctctcgatctatgggatcgctgtaatggcattttggtgagtcggcacgggcgtaccggtcagcaatcccgacggccttgaccagttccgcctctacgcatacagcctttctttcaacatctacagattggcgcatcaccaggtcgtgaagcattgaagtggctaccgcagcttgtaacatatgggaaatatagcatagcataaatgacagaatggctacaatcgtcaggacgatcgttattatccatgcgcgagacatgagaacagctagggggacaatgccggacgagaaatttgagatcttggtgagacagttctccaccatccagtctgcagacctcgattcctgagctcgggatttgccgcgagcgtccgacctggtggagtgcaccaccccaaacccagcggtcgaatctagtcgatgtactcgagtgcacccgagctagtgtggcctccgaccgcgtgggcacgggcagccgtctgcctgtcgcaacggagaattccgtacggagtgtggatggttctttggtggccgccagtcgagatctcgctgagcttagggcgcccgccggcctcgctgattttccagatcttgcagccgtgctggcaggcgcgagggacatcatcgtcccagtagatggcgtacgaggcagacgactttctgccatgatcgcgacggtcacgttgagaccgatggtgtcggcagcaatctcgccgccatcaccgtagacatcggcagtttgctttttggaagcgatggtttcggaccaaacctctgtccacttagcagggccgatacatttggcgaccttgtcatagaagatgatcgacatgaccaccgaatgagccctgccgatcgattcaagacagatggacagcccgccgggcagcttgaccctatcgtgtcgggcctgggtagatccagccgcctcgtgcaagatagaagtgtagtgggtcaccagtcctcgcgaagacgagtcgagagtcgaggggatcaggctggacatggtcgcgttaaggggggggtttggtaacgttttcgatggcttaggtgggtttggcgcgtagcgataggatgcaagatggagtagtgtataccaaacgaacagtctatccagcaccctcccgagctctagctgctcttatatggcggtcaggctgggctaaatctcacaacgttcgtcagcagatgacatgacgagccgtgtgcggacgatcgtgttccaacgacggtcgttcaaacattgacaggccggacgaccaggaactagcgacagcacaagacatcaggaacagtacgacaaacagactgtgactatgagtatgacgacaaagtgagaccgaactggaacccttacgggagacagctgatgagcctcatcacgcaaatttggagccgccgcgtttcagatagggatcaccggtaggcaacagcgtgccggcgtgcctgaaacggcacgcagacgagttttcagctattgaattataacaacatactacaagcacgtcatctcgacggagccagacgattatggctctaatgacttgcaaaggtagtgcggattcgggcatcgatggacgcgaagaaatacccttttcttgtcaagtgattacacatcgatgccgagtgctacaaacaaaatcgcgaaaacacactatcgctctttggtttcagttcttcagtgtatcgtaatgtagttcccctcctattcccctcccatcgtcctgctatgggcgcatctcgcctcgaagaattgctagagtcatacatggttcagctcgggtgtgacgaacgagatgacacacatacgcactcctacagcgatgcgtccgttactcttcgaattcaaaacgcttgactttgggcgattgtccctgctttgcttcaacaagccgatgatggtatcggccctggcaggagggatagccttcgaaactgagttcatgactgacacacgccgatcttccggaagttgaggtggtgatgcgcagccccacttcaggagcttcgacgctgtggttcgtgctgttagccatgttgatacggatggtctccgaccattcttccctccagcgagtgagatcgatctcgttgccttgtttatcgagaaaggtaacgcctgcactaacgctgtgtcgtcggccatgagaagtaatgctgacagccaagctgggtagtagatgtaacatcacgtaacagcattccgcggattgatacccttcgtatcgtgaagatgaagcgccgaagtatagacggtcggacattgtggcaaccaggtatcaatcagctgtttttgggaaggtccaaaagcaatcagcgtttgctagtccctttacggcgtggacgcacggagcgtttcactcactgggttgttgggtttgtatgttacccgataccagggcatggagtatagcggagagtgccgtcgaaaggcgatacagaaccgtgtcttgagcttcatatatgcgtggccgagtgatcccgttcgaaggcgaattcaaatcgaaggggatacattatgttttcgcttgtcttgcttcgcgcgtttcagggtactagacgaccaggcaccgtcgctgtcgttctcgcgcgacaagctcttaccgatattcttagaaacttgttgcgatctggatcaacgtcgagaacatctctttccagtagcatctgtctggtgagtcggttggattcccatcgtattcactgttttcgaaacacggacgaagtgttgcctgtggtcctgctcggcaccgccaggaaaaggtttcttcgcaccagcgtgtatgaatgcaggtcaattcagattacgggatagcaagtacgagactggttgatcatatatgtgtataaagactttcagatttgacattggctattgatactcgagttgcttgagatatcggaagcatcgtgactcgcttcgaaggcggcacgttgcgttcaacggagcgaaaggcctagtaatcgtcggacctgttaccaccgtatccctcgcgactggtacggtatcccacaggccgcagtagaaagtcagacggtaagctagtgattgaaaagaaaagagtttcaagctcaccggttctcggacccgtactcattctcgtccttgtcccttcccgagaacccttcgctaccttgagcctccctatcataatactttttgttctcgccctcgttgttcctgccgaactcgttctctccatcatccctgcgggctccgaggttgccgtccgggccgttttgtccggcttcatcagctccatattggttggaaccggtgttaccgtatccttcggcgcgcctctcgttgttgttgtcgtcgtcgttgtcacgtcggttgttgtacccagacgaaccgcggttgatgtcatcgttctcccggttgttgtacccagtatcagatacgccgcggttctcgttgtagttcctgttgtcgttatcttggttacggttatcgtacccagcggaaccgcggttgtatccttcgtttccgtcattgccgtccctaccaccgaggccgctgccataggtgctgttgtttccagtacgatcgttatcattgtccttgtcgtaagcacgagtctcgtactcttgttgtccgtagatgccggattgagagagggccttcttggcctgctcagcggcatcgtgtttggcctgtgacgagcgatacatagaattagccacagacactatttttcatgggtgaagagaggtcgatcaccttatacgagtcgaattggtccatacccctaacggatgagagggttcggtgggaaagatggggaagagcagaggaggcttgactcagactcacttggtctcgatcaagtgagtgactgcagcagtagccaaaccggccatgacggtcttggcatcgtcctttgatgatgatgaggtgaggcgaggtgttaaagccagtgcggcgtactgttgaccaaaaaaacagagctgggacatacataggtctgaggcttgccatcagtctcttgcttctgttgccattcacgcacagctacggcagcagctgcaccggccaagagatcatgagctggtacgccgaagggtgtttagcgaagtcggagtaatcctagcccgtaagaatgagctcactgatatcaccgtcattgttttcgaccttgttcaaggcgtcgctctcgtgggtgtcgtcgtggtctccgaacatgttgtgcttgtattgcttggtaaggtgatttggtgttggaaaaagtagatttagttcgtgatcagtcactaatatgactaggttactgtgagctgaacatagtacaaagtgaagctgatccgaccgcctcttataggatccaccgtccattggggttgtagattatgacaacgtttgatgacgagctcgatcattctcaaaggatcaatgacgtagttgatacccccgcatgagatcatcgaatagaacaatgccatactttaattgtgatggcgattcactctatccccgtccccacgatccaacgaacgtgatcgaattgagctcatttcccgccattttcaaatcgcaacgaggtcacgaggtggatatcctctgaatttctgctcgagaccgatgccgaggacagtttgttgatcgaagtgatatcatgattgatgaaatgctcatccgaaacgcgaaccccgtcttgtcccgcggagatggccgacagcgacacaaaccttatttcgaatggagatccgcgcacgatgatcgttcagggaaattgttgtcgagaagcatgtcaatccgtgagttgcacgctcgtgaaggctcgattactcaagacaaaactgcacagtcacagatacgatggttgttacatatagccacaaggtcgaacatatgaaaaccaatcaagtcccggtcgccctcggaacccagctttgacggcaagaaaatgcgtgccctattcactagcatccacactgcctataaacacaacacatccggcaagcttcaccaatgccatgattgcgttcgactgcccggaaatctggtcatctgtatcctctcatggagccgtaccaaacacaacgtctacctaggcgtcgctttctggagtcgggccgagacccctgtggacctgctcgactggtacaaagaatggcacgacgacctcgtcctcctctcttccggagagcagcctcccgaccgcctgctacagccggaagattacggactcgaaatcatcgcaagagtcggaaggttgtccaaggggaccgtacaagtcagcctggtatgggatccggaaccgggggatctctgtcgagaagggtgcagcgaatatcagctggttcaggagatcgggacgggacggatggtgtttgcgtgcgttcccatggcgcctcctatattctgagagaaagtcagtatcgatcgatcgtcctcaatgtagagtttcactaatattaccgcgcttgagtatggcaggatatgagccggtagtaagacaggatgagggagtccgtcggacaactcgcgatttcggtgtcaagcggatctgaaacatcataaagagttgacaaaccttcgaagtgtataatgcttagtgcatgaccatgaacgagtcaagggatagcatgtatatgccccgttcggaatgatgcggtcaaggaagcgaagcgagacgaaactttgccgacaaaggagttcctataacgcaaagtcacgctattctacatgccattccactgtgcacctttatctcgatggtatataaggagcgctcgaaacgaaaagctcagcgaggccctcggtatcagcagtcagtagcttccgtatcacacatacacctttgcctcatcaacaaattccttgcgatgccatctacctcttccatttactctcaaggtcgaccgaccgaaagcattgtcaggaagcaaggtgagctgccctccgcgcctgaccatagcattttgcaacaagctgattagtactctgtcgacgcgacatccagccatagcgggggagcttcgagaaactgcggccgtctctattgacgactatgccgcactcgtccgccgtgtgcagatcgaagccaacgagaagaagactttggggcccgacgaggtggaacggatcttgccttacctgactcgagttctcatccgcgtcagggctgataaccccgacctcggagtggccgatcagcagcgcttggaaagatacgtcgagagggccggtgatatcttgaagaggtgcatgatcgaggacccgtccgtggtccagctgggatcgtgatatctcggtctcagtccattctctcagctcgactcgtcaaatttgtggctaccaagacattcttgttgtaaggcatgtgacttcgcctaacttgcttgcttgtatatacaacctgagggacctattctcattctcatcgagaagaatttgcacagcccgatcatgtaagaagtcgaaaagattgtgtgttcgttcagtagcctcccctgcctcttcctcctcggggtgcggcttgacccccatatccaccgtatcctcctcgtccgggattggctcccccgtaacctccgtatccaccgtaaccagcgccagctccggccccggctgcagcaccgtagcctccgtatccgctttgcgcttgagcaccataacctccataagcgccttgacctgcaggggcgccgtaagcagctatgtgtccagacaccagtcagcgcgccctcgccattccctgccactcgaccttttcacttacgctgaacgtgcccggtctgataagccgcacctgcaccgccgtaacccccgtacccactttgcgacccgcctccgttataagcaccggtccctccgagtccatatccacccgacggtgcgccgtaacctccagcattgccaccatagttctgagcttgatgtccagaaccggcgttagattgtccatagcctccgccaccataacctccacgggatggagcagagtattgacccccctgaccacctccgcgagatgggccattgaagcctcctcttccacctccacctccacgacccctgcctccgaagcctccccttctaccggttcgggtttgctctcggtcctggtcattgaggaccgtctgcgggtgcttgacaccaggcagcaacatcgatcgatgaggacgaagcatcttcgggaagtagtatcgtacagagagtgtccgattgtcggtaatgtctgggcactcctcgacgtcctttagaggcgagtccaagcttgcccctggaatgcacttcgggtcgtccaggacggctccacagatccccctggaaactttgccatcaatcggaaccgcctaagaaaggacgacgtcagaacagccgagacccttgacgtgcgttctgaactcactctcgaggccttcttcttcgtgtaaagctcgcagaactttggatataggtcattgtcgtccgagatgagcatgacattgtcccctatggtgttccttctcttctcgtccggcgttaaaaggggttccacagtggccagggcaccaagcagtctgtcttgagaaatgaagggaaggagggcaatcccttgccatgccatcttctttccgttcatgtcgatctcaaaatcgggaggatagaaatcgaggatcggagaatcttcgtccaccatcaacttttggaaaggttcaggcaagtgttttttactgtcaaccatattgtggggatcagcaacctcgtcgatcacagcttcagttctgtaatgactgacctagcagcagggaagactcccatcagctgttcgaacggcttgaaaggtcgaccttcagtgaatgcgatgtcatagttcttgatgtccttgaaatcggcggcaaatggcgcataatggaaaggatagaaccattgccacgatggagtctgaggtttccggtggtaagcggatcatctttactccgacaaagggacggatactcacgccttggaagtagtagtggagcacccagttcataccctccatgtaagccttgaccaccctatttacgctccaatcgttagcctacagcagatttgacaacaggatccaccagactgactcggtcctgaatggaagatcgctgagttccactccaaacttttcccggtagtagcgctctctgtaaccgggctcccaaagcctggtgaaaagtttcgttaacggaggtcaattgattttgagaaaattgcaatcacttgacggtatcctcgtaatcgacagtgccgtcgggattcttcttgagcttggctttcctcggtggcagaggctgatcggcgtccacgtttggaggcgcttcctcctcgtcatcggccaggccatcgttgtcgactccgtcttccgcgacgtcggccgtgactggtactggcctgtcgttcttggccttgcgcttctttccgcggggcgaagaaccatcgccagcctgatccccatcctgatcgtactcatcggccgttacttccggcttgacctcgaccttgttctcatcgaccgtctctacagagctctcgtctgaacctgcaagtttcgcccggagggcttcggcagcggacatgttggcctttttcacgacagtacggtcttcctggattggatgatcgaccaggctcatcttgccccgttgtccaatcacgggcatgtcaagacccgactcaggcgcaggcataaatccaggccgcacaggtagcgagtggtggatcgacttgacaggtggggcattgacctcgaccaaagacacctcgtgcgcctgaatagtattggcaggcggagcctgcggctggcctcgtctgggcgtgttgccttggtcattgccttgattgttacgttgtcgcttcatggcagggttctggcgctcttcagctgtgatgaaatcaaggattcgaggcttgtttagcgacgatgtacgacgcgcttggcggtcacagaatcattgagctcaccttcccgtcgcttctggaagatattgtcttcgtcagcggctagaccctccaagataaattgggcgcggtccatctcgacacgcccgtggttggtaacgtatccgcccatcctctcaaattctcgtttccatatccggagaagggtgtcgatggcgccctctcgaatttccagactcgggagatggggcaggaaatcgtttccgacgaaaaagattaggaacacccagtcgtcaattgcccgctcaagctcgaatggtaccactggcgatcgcaggtcgagctcgacagccagatattcccgcaaagtgctgacgtccaggaagatgaacggcttgtcctctactggcgcgttcttcacatcgttcttgtcctgcttgatcttcttctctcctctacattgcgctgcgatgtgtccgacttgaccgcagatcctgcaaccagaatctcgcgactgttggtagaacacgtcctctcgcaggactttgaaatacggctcgtgcgttgccaaagccagcatgatcaagtcggcatcctgtggagaagtaaggtaaggcaagagttaggacagccccgttcgttcgattccgaactcgctcaccaaaccgtagatgacgtgactcgtattagggtcatgttcaggatgtgttcgctgtcttcgaatccagtccatgatcttatgctctccctctcccggtacggacgcatcggagatgatgacatcgagctgttggacgcaagaatcaatactgttcatcgggtcacttgtccgagacatcgacacacattcttccaaccagggtcgttgttcaacttccaagcaacccagtacctcagacttgctgcgagtaggtccataaagggagtgcctgcggaagatgtatcagtaggggttcgtctgtagggctctgcggctgtttcatggggactaacctggcgtgatggcattagtgtcccatcccttcttgtcgagttcagcctgtgtctctgcagagacaggatgacccatctctaattagataggaacgttagccaagaacgtcgacgcaaaagacgcggcggggtaagagctgaacgaaccctcaaacatcttgacggcctctagcctgctttcctccttgtcagcagcctcttgggcagccctgaatcttcgcgatcgctgttgattcatcttggctcgaggggccacaccatctaggatcacagagcccgttcgtcagagtgggagggaatgtagtcttgaccgagatgcgagctcaccaatcgccatcataagaaccttcctgggtcgcgtcatgttcaccacccgctcggtatacttgaagacctcgaccatcatttcctcttcggtctcaggagcaggctttgaggttggcagagggtcagtttggagtcgaatctgtataagcaccaagatagctcaccttcccctcgggatgggtacaaggatgaacgataccgttcatgtcaactgtaatagagcgaacctctcagttgggaagccgatgccggagtctttggaatggactgacgataaaggttgtcgacctcgaacccgttgggattcgggccaccatagtttatggactcgaaagtatcttcaccattcggtcctggtaccttctcgggcttgtcttcgatgacccgctcaactgttgagtaagggtatggtgagcgagtcaagcgatgtctgacgaatcgcacgttcactcaccgatcttggggtactttttcgacagccatctgaacaaggcgggaacaccctgtgtccggaacaaggaacagggttcagttacccggcttgaatccctgcttctttgcctctgcgaccacgtaccattgtgacgagcgattccggtgcggattttgctgaatggaagaccgggccgagagcaactagatgatctgacgatacaatatgaacccggacaagctgggtatatcgatcgttgttcgtgcgtgctagtctgaaagagagacggtgtacggtctgaggttcagctattcaaagacctttagcatcggtgaggccggcgatggcgtaaagtccagatcgggcaacttcggacatggaaacgtaaagatgtccgcacgacatcgcgttcagatgagcgatccctatcaccctgtcttcggcgctgaccaggaccatgggctagagccgccgtcatcgccgctgcaaagttggcctccttgatttcttttgctacctgaatttatggacgacgaacgagaaagcacgtataattgcacgcaagcctcaagttcggaatgtcgttgttggtatacagctacaggtatggaataaatacagtaatatcgagggtagttctctttgcgtccgcagcggatcctaagcggagcaatcatcgtgtgctcctcctgatctttgcctacctgcgaaggcgtttcgatagagttgctagaccacctgtccgtcgtctctctctccggtctcagcagaaacagcagccacaacagaggataccccaataggcgccgcagcatgcagcacagcatcctggcccgtcatctctcttctgctgcacgacgattggtcgcattggttgatgatgggctgtcgagtgatcaaacgtttcaaagttagccatattcccgccacagtgaagcggttttgaggcaacttacgttgcatcatcggtgcctgtccgtagtggtgaccttgaggagggccgaactgttgtggtgggtatggtcctccgttgttgtactggggccgcgagatcaacgaaaccgggtatcagcacgtttcgctcgaaccagacttcatgacctgacactcacgccgccgccgtatgcgggagcaggttgctgtggcctgagggattcgaacagaaagaaagaccaagtactcagcctgccatcgagttagctgaaactcaacgtcgactcacgcatagtattgcttctccttggaaccgaacattgtgcgtataatctgcctgacttaagttttgttgcacaaaagcgacgataggtttatgtttgattgaagaggctacacatcgaggcgtgagtttggtcatagggagtgttagcttggcgatacatcttgattatatgaaaggatgaactcacctcgaattgatgtgaatttaataccgtcgtttgcttctcaggtatcaaaagtgaagtattgaagggggaaaccaccaaacgagatcttctggatatatataagcatttttcagacgatgcccattctacgcagcaggtccggatgtcgacctgtgtatttagctctctgcagatgttggccgatggcgattgtgaaagatcagctgtgttcggtctgcttgctccgacggagacaagccggaagtaaatattcaaggccgtggcgtgacgcctgcagccgccaagccagaggcggggaagcgtctgattgccgagagcgcgagagcacagcggagcgttcaatgtccgtgtgcaagcagatcggctgactgcggatcgtggcaaagcttttgaccagcaaacaggcagcaaggcgatgtacatctgttcgctcagcagggtatcaggttcgggatctattcgatctacaactggaaaacgatggtcttcgtacgagccaaggatcacaagtcacgtggatttcgtaataatatgttcgttaggtcgggcttgcccgtatcgttaataatgttgtcgtttcggcgggacagctcggatccgtcgcttttccccgcatgctctttgagcatgcccagggtcgtcgaggaatgtgctcagcgaccttttcttgtccaggttagatttcatgtggttcgtggtggtggtcgtgtcgggccgatacctaggaccgctcgcaagctgcacagacggtccggctcccgattgctgggagctgagaaacgggtcatccaggtcaatactatccggagcgctgtcgactcccaacccgtcggagtcttctccggacttgtgctcgaacttgagggaggagcaggaaatcgttcgacttctgccggtgtcatgccgagcctgtggtaagcgggtcgatgcagggtagacaggtgaaccgtctgccgaattgacctcgttggcctcggtagtttcggtcaagacggagaacgaactggaggcacgctgcgtctttcttgcacctcgagacatcttgaccttgatctcgcgtttggtcggttcagtcattcgtgaagggggaagcctgtacgatccggcctcgggatacgggtttaggacaaatgagtcctcatcctccgacccttccgtatcgctgatgcccagcgtgcccgtcacttcaagtccagaggtactgtcgccgaccccgtcgagcagaacggatggcttgtcaccgtgcagaactcgagagcggctgtgcgatcttcggtattgttcgagtttgatttccaagtctctgcactttcgtttttggctggccagctatgataggtgggatataaaatcaacgagagacaaaatacctagcaaaaaaaccaaacagcaaacacttacctcgagcttgttgtgatccagttcacgtttcatggccgtcatcgccagtcgctttgctgataactgcctttcgatggcactatgatattagcagaacaaattctggctcaacaggctgtccttgcaagacattcgcgacttatctgacgacaactcactctgaggcactagattgatcggccttctgatcggccttcacatggtccaactgagcttgcaaggagctgtttcgttccttccatttggcgttcaaccttctcaactcttcgttcagcgattcctccctctcagccaactgctcccgatgtagctttctttgctcctcgatggcctttacgtgttgccaatgcaactccttcttttgtctcttgagcttatccgacaattctttgagctgtctgttctggtcgattcgagcctcgtggacacgtctgaactcggtctgattctttcgagtacgcttgaagctgtccgctatgtatttccacttttcgaaagactccatcatctgttccaggtggttctgtagtgatgggagccttatgagcatcagccggcgtgatctacgaagctctcccacagtcaaactgaccctagtcgtctcgacagcccacatctcgccgaccttcgcaaccaccttgtccagcttttcgcgtatctccttcaccatacccggctctggattcttattccatgcatccaagtctagctgatcgatcatgtcgtcgtatgcttgccgatccgtgacttctagcctcggcctgagctcgtgcagcatggccagcaactcgaggatcgatctggtagccggtgtcaacgccagcaagatctcttgcggtgcaactgcttcgaccaggccaccatcatcatcgccctgggagaagaagcagactctgaagctttctggcctttcgtcgatgggtgcattgcagcagggacagtcgggaattcgacctttctcggctttggaagcgtaccaagtctgcacacaagaacgatggagcatgtgtcctgaccgagaaagacaactcgttagcatgctcaaagcggcaaaagttgacaaattgtggtcggacgtcaaggactcaccacacgcattcagcctcaccacggcatgagcggaccccacatcatcaaaccctctcagcaggtgatcgtggcagattgcgcagatgacgctctgctgggagggcatactgagccgatcactggggttcaccgtaatcagatggagtcaaatcttgagccgtcatcaacaccaaccactgatcgcttaagctaaacgcaagtctttcaaaatattaatgaggctcggtcgacactccttaacagactgaatttggtctgttgcacccagatcccccacaagatcaacaaccacaaacagatctgacgcgtgacgcgactctgctcggtaggatgggcgatgactagctactagcgactagaggctcatacagacaggcgacaccccggacggcagtgatgtaccctaccgtgagacgagcagcccatctatcgggtcgcggagctatcgctacggactgtacaggttgtatgattgagaaccgggattcctaagacattttgaaaagccatttccttcacgttgaccgagtacaggccaagcgatcaccctcttgttttgcctggaagggcatccgcgatccgtcccaagcgggcaatactcgtgactggtcgaccgatcgacatcgtgtgcgacgttcgtatctctctcaatatctacccacgtactcattgcagtctgatatgaactcgggctgatcgatcacaggtatggaatcgaagtcgctttcccacgcatacacaggtggttgtacgcgtttcattaagaaagagcgaggtagaagagagtacaataagatcgatgcgatgcgattgatccagagccgagactcgtcgtgaagcggggtttggccgggctatgctgtaccgagtggggaaagaagggggggactaccctgttcaagttgatcaacatctcatcttccaatgtcccaccatagtgaaacatcaagtggagcgtaccaacgaggtcatctcgtagctgtaaaggctccttgagatagtcttgctgttcgaccgtacccggaacgctttgcccgtcaaagacgcctcagcaggattcggggcctattgttgatgtagccatctccccggccttcaaacctgtcaacgctctgcccgaacgagcaacgctttcgcaacacccttcagcctggctggcgatttgaccgatagacaccaatatagcatctgtcaacgctagagtgatcttcaatcgcgggatctctgcagcagtcacggacatcattactcacctcgggactggcctgcacgcggttgcataaagatcgcctagacggggttgcttggcgagagaattcgtcgactgtatatacatcaagtgctgcaaacgtctcaagacactccgaccatcagtggtcctcgttattcgtggagaacttcaagacctcgatcccgtcatttcaacaaacggggtggccacgaacccgagacttcctgatctcctttggcggaacagattcgagacgggtcgtaccctttctgcgatacaggacaaagagagattagggcccttttcatctcatctcaacgatgaatcccgcctcgcgtctccacccggagcatatgggttatcctagccaaggtcaggccgaccaggctggtcagggacgtgtgcgacgaatggattccacatccggcacatcacactcctcccatcattcgtccaccaactccaaccatcagaacggtactggtgtgaagcgatatcaggagtatcagtcgagtaatggaaataacaacttgacgccccaaccttccagttccagcggacaggcttacaggtccaaccagtaccaaatgtcgccgagatcgtctcgaaccgatctgagggaccgcgatcgggaccacggatcgtactctccagtatcacaccctaactctccctcactcccctacccgcctgggtcaggccccagcacaccgaatcgaccgtattccagccagcaacatccatttcaatacgttcagcacgcagtgcaacaatcgcaacctggagagatcatctcatccgcacagtcgcaatcccgaccgccttacccttatttgaaccatcctcctatgtcgcctcatagcgctggacctaacctgagtccggggttgtccgcggcgatgaaagatcttcgggtacctcagcggagcgcgacggatccgcaacaatgggacgcgactagaaatcgatacgaggacggcggcaggagcaggagtcggacggtgtaccccgcagcgggcgaggatacgtatgggtcttacggtgccccgagtgcggctgctcagggccgaggcagtgaaggtctgggtctcgggccggtcaagggacaaggccagtacagggatcgaagtcccaatcgatcatacggcgttcccgggccaggacccaatactgagcgtcagaactacaatacgaacaatctgcggattgcacccccatcgccatccaggcagggccgccgatcgcctaatcggagtcccacaacacctagcagtgccactatgccaagttacatgaacgtgccgctccctccaggctcggatcagagtcatcaatccatgtcgcggatcaacgtgacgtcgccgaatgggcatgtcgaaccgatccaagccggccagtcgacccgtaatcctggcaatctttcgcccacaagtggctatgaccagggcgcagcgagcagaccgtatgatgtgcattcacatgggacttttacgagcaccgctccgggtcctccggtcagacgtggatctgatctaccggccactaattctgcgagcgttggaacggtgacgcctaccacgtcgggtactttgactgcatcaaacacaacgaacacctatagctcgacatcctcaaattctctcgatgcgaggaaagatgatgtctcggcgggtggcagtgcggacgcaaaaagtgccgccccggctggaaatcagggctcacgggctactggatccggcagcagcggtggcggtacacttccaagtggcagtatatgcggaagctgcgccaagcccgtcaaaaggcagttcgtgcgagcgatgggcaaggtctatcacctcgactgtttccgatgcaaggtgagctgccgtgataggcaaattgtcaacacttcggagacctgatgttacgtaaatctaggactgcaacgccgtggtcgctgccaaatttttccctgtggatgaccctgatggctcttaccccctatgcgagcgggactacttcgctcgcctggaccttatttgcggacagtgcgacaaagccctacggggcagctacatcactgcctgtagtcagttgaagcccctcgccgaggcttcctttacatcgttgctgatatgtcgcaaatcgttcgcttttcctctagacaaaaagtttcacgtcgaacacttcacttgttcggcatgcgctaccgtctttgggccgcaagactcctattacgaacatgacgaccaagtttgtgagtggcattcccccgcacaacgtcatctttctctgggcctgatcagacggctttttcccagattgccacttccattactcgacgcgttttgccaccaagtgtgtaggctgcgcgaatgcaattctgaagcagttcgtcgagatcaatcggaaccagaaggatgaatgctggcatcccgagtgttacatgattcacaaggcaagtccatgcgaggatggtgacagaggtcgctatgctgacgcccgtttacctacctctgttctagttctggaatgtcaagctcacttcgaaattcagggccactccagccaactccacagatccttcaacggtgtctatgctcggcgatgtggacggcgtgcccgaagagcacaaggagactgccgaaactttacgagccaaacagcttcgaatggaaggacaagttgaacaaatttggcgcgtgctttcggctttcgaggagagctcggccgcctgcatctccgaaatgttgcgctttgtcagcgcagggcaatatgcagaagcaattctgatggcagaaaggttcattttgcacgtcgaaattctgttcgctgcgatcgatgatctggaagcacaatttgcgcaagaaggcgccaagggtaagttcatcatactatggcaaagcgttcccatagccgactcaccgtcgtccgtctcaggtatgcctcattctcgcgaggcaaaaatgttatgccggaagacagtcaatttcttctcgctgctctctcacacgcaagactcgcctgagcagaaggctcaggtcactcaagagttactagctctggttacaggtcttgcgcattacctgaaaattttgatccggatagctctcacagggtcgctgaagctggaaagggagcatggtaacttgcaagctctggactatctgctcgcgagactgtcattactggcaagagacgatggtgacccattgatttcgaagcgagggtctggcaaacgaaagctagataccatagtagacgttccacccgcctttaccgcaagcacaagtggggtagcgtatggttatcggagtcttgctgtaagcaatctgcccgtttgtataggtctttcaagacacgttgctaattaccgtcgacgcgcagctcgaggtcgttggcgagtcagtcttgaaaggtcgaccgcttacccctcgcggattagatgagtgcttgaaatgccgcaagacggtcgaagaggactgcgtgcgactcggcctttttgaaagatggcatgccccttgcctaaagtgcacggagtgcgacgcggccgcaagcatcatggaggaaatccaagctcaatctgacgtcgacaccaggccgcccaagcggcgagcacttccccgaccggaaggcttcacctacgttgccacaaaggtcgtttctcccaacgctgtagacgttgcggcagtcttttgccgggtccacgctcagcggaacagtgtcgctggctttgaaggtgtatctcggctggaacaattcgcctttctgctgaatgtcgcgttacgacggctatgggatcaccttcgacatgctggcgtgatcactgcctcctcaggtgagtttaaaaggtcacatgtggcaaaccgcgtaaactgacacccttcgtacagcgaacgtagcattgccggcaacagcggagacgacttcgtcgctgtacgactcataccgggattctaccgacatcaagagactcaaatcggtcaacctggatcgcaagttgtctgctaccgcccgcatgcctcaacgatcaaccatcgttgaaagtccttcaggcaagacggccaagggtgatggtacagtggaacctccaaagtccctcgatgggcagttgcagaatttgaaagccctcttgcccgtagatggcaagccggacgaggcgccggtctctgctacgccttctggagccagtcatgacattgtgatcgtgcaacctgcggacgaagacaataacgcaaagaggtcttcgcgggtggacatccttcggccggctttcgggagagccaacacacatgtggctatagtgagcgacaactccaacgagaactctccgggtgcttcgacccccaaattactttcgagggccgaggtagagagttcgccattcgagcatgagcagggcgtcactctggccgatatccctgctttagtcgaagcggaacaagccaagctggagcatcgccctccgccagtctccgaaggccgaccattgatgtcggagctgtcggctcttgatgcgacgatcgtaaagcattttgcattgatcgccctcaccaagtcttcaatagcgcactatatcgacatggaggagctgttcgaactggttgagatacggaagaatcaatggtggaacaagattttcaagcctggcaaggacaagaaggatgtgaagcgcaaaggtaagtcaagttgagactagatatacctctcatccgtggagcctgacatcgagcgagtctttctaggcgtatttggggtaccattggagatccttgttgagaagactggcagcgactcccagctcggtgctaccaatgctcaattgcgggtccctgagttcatggacaacgtcgtttcggcgatgaagcaaatgggtacgtcggccttaggtatacgtatgagcatcggccctaaccgaatctgtctgcagacatgtctatcgagggtattttccggaagaacggcaacatcaagcgcctcaataatgttgccgaggcgttggaccgcgatgcggcctctgttagcttgtcagacgacaaccccgttcaactggctgcgctgctcaagaagtttttgcgggatttgccggaccctcttctgacgttccgtctgcataagctcttctgcgccgcacaacgtatgtctgacgtgatcacgtcgaatcgccctcgccgcgatgttgaattccctcttatcgaattgacagatcttcccgatgaagaggaacgcattcggtgtttgcacctacttgtagcaatgctaccacggacgaaccgcgacacgctggaagtgctgttcgtctttctcaaatgggtcgcctcgttctcgcacgtcgacgaggaaaccggaagccggatggacgtgcaaaacctcgccaccgtcatctgccctagcatcctttactcgaaaggcaccaatgcgatgcgggacgatagtttcgtagccatccaggccgttcgaactctgatcgagcaccaagacgaattttacacggtgcccaaagagttgcaattcgtgctcgaggagaacgtcagccaattgttcaaggacagccttgacctacctccaaaggaaatctacaagcattgctccaattatgcaaacgctcggagaccttactatgcgaagaaggcggaaggtggacctattcgtatgggagattacggccttgctagccataaatcggatggaaaccttattgccactgcagctggacttccaggcggccgagcgaacactcccatacagaccagtggacctttcaacgtcgcagcaatgggcaatgctgcctcgggttcccccactcggccgcaaagttgggcagatgcgccaattcctccttttcacaatatgtcccagtccgtttcgcacccgggcctgcctcaccaaccctcgggccagatgggtcctccatcagctggttccaactcgataccctccggatcaccgaactctcgcagaatgtggtatcctggacatcgcggctcgacaccatcttcgcctgtgattgcagcatcgctgggtgatgcggatcgacgaccctcgtcatctatggatagagccatgtctccatcgcatttcggcgaccgataaccatttctgcgaaatgggaacacaggtcggcttcgctaagtggttgcaacaaggggtttgttttcgcttaggatagaaagttacggggcaggtacaacaaatacgtgacacctcttgatttactgttcccttgtatctgagaaagggcggtatggtatgatcgaatgatcgttttacatcgacagccggaccgaagtcagtgccagcgcagacctgagcttttcgagcaggtgaatgaattgagagggttcgactcgatccccgctcgtcagtctcgatgacatgagcactagaactcaggcgaccagggcgggcctcttctccttattgtcaatgtccgagaagcgacaatctaccgagcttgagtgtgatgataatggaccggatgccggggattagtatttctttcgagtatgttcagaagtcataccgtcgagactaagcaaatgatcccgttcactgtgcggcaatgtgttcacggacacatgcctcatgacttctgcagaggattgtggaatacaccatattgccacaagtagcgtgatcacatgctacaagtccgtcgcgcatcggggacgcaggcgcttctcaaaggataactcctggctcgatcttgactcgcggttcctcccccggtatcacaccgtcgtgcatcctcagctcgtccagaagcctgtcgatatcgggcgtcatgacaaagtttttgttgacctctccgaggaccgtggcgtttcgtcgatggtggtccatgtgcacaagctgctggacgaatgtggtggggacgccaggcgagacctttgtatatgcacaaagagggcgattagaatctggtactatgaccgccgacgacatgcaatactcacatccatgacgatgccgtctccgagtaccatcttcacctttccactcttcatgacgaccatggttccgattcgcccctccggctttctcgcttcttcttttttcatcaacgctcgcagcttggcatccttggccttcttttccttttcctcctcggcagagagcttcttcgctaccgcttccttgtctttctcggcgtcctgctcggccttgtcggagaaggacactccctttttccctttgtcggtcgaaggagcggctgcaggcgtctcgtccacgagctccgctttgggtttcaggtcttccaggttgacgtctttgaggaaggatcgagcggggtcggggatgaatctggggaagggatcggggaactggagaagatacagtttgtctttgggatcggcctgtatagcagcctcgtcagtgtccaatcccggcgagtagggccagtccatggacatccgcttacatccccctcaaggtgaacaaagtcgcctgtgatatcttcctcgtaatcttcgatgacgatctcatccagatcgatcgcctgcttcgcttcggtcacttccttttcctcctctacggcttgactgatccggttcccatcgacgtccatatccatgctcatgtccgcatcggtcaacctatcatcggtcctcccggcaggccccttgcccttgtccttccctcgagcgacggggggtaacgatctgtcctgcttatccggcgacgtgggttcctccttgaccacgaccggttggtccctcactcttgtgccggtcgattcgccggcaccggcctcggtcttgacgggcttcttcctaccatcccctagagccgcggcgatgcttcgatgtcggatcagacctgtaggcgcgctctcccctgattgctcgggtacgacctcgaggtcgatgatatcgttctcgtcgtcgctgtaagattccccttgagcggtgatcgtaggctttcgatcggcatgcatggcggccatggggtccggtcccgtcggagcggcccgagctcttccagtacctagtaacagcatggatcagtctgaggtagtacgatttcaagcctggacagtctgagctcactcatgctaggcatggcgaatggtccacttgcgaccatgtcttgtccaggtcgagtggatgctgtagcctgagcggctccccttcctcgaccacgtcctcgtcctcgggttccatctctaggtcctcgagcgcccgcaccctcctagatccgctcactcgcgctgtcagtcagggaatggcatgcctatgacgctacgctcgtacataccttctttactaccgtttctgctgcaggtctgtttagactttaaagttagccaggtctccgtacgaggtcaaccgcggatcacgaactcggctttgatcttcttgggctgtaggaccggcttgaatttcatctttggcttgggcgctgctgcaggacctccaggtccagaacctgcggcttctcctcctcccgctccggcagcaccggtactaggtccagctgcggcattactgggggccgccgcaccaggggctgctggtcttgcgaaacctgaaccgattcctccgagtttaggtggcattgtggatgtaggggcgggtggggtcgtcgataaagtatgatatctgaccttgacaatgagagaaatttcaatgatccctgaactggacgctagctcttagctttgatctgtttggcctggaacggtgaatttacttccgaaactccaagatccacggaagtaaatatcgagaaagatgacgagaacccgatagaattcgattgagtacaccactcactctgatcactttatgccatcatctggttgcgagtttaccttggcaaataatgtgtatagatgagttccctcgagatctcataggtcaggtaccccgaggaacagtctccctcggattatagtatcagaccgcccattcattcagatcactcaagtcgtctcttggataaaatacccgacaatcatcatcggatcggacgacctccactttccgagttgttcaaaccagatcagctcgagcgatcgttgtacaggtacatcaacgtacatccagccgcaagttcgatcctttccgatctgagatcaggatgcctaggccgtccatgccccgaccggacgataggaccatgtcctacctcatcccgcctccgacgcctagacccggcttgaagcagaacgacgaggaggaacggatgccgctcttgatgccatcatcggacacccttgccaatgtcagtcgagaaccccccgacaccaatgcgaatgatcgaaactaagcgaatgggtctggtgcctcctcccttagacgcaagtctacgctttgattcatctgatcagagtcgacgtcaccagtcatatcgacacgccgctcacgaccgatcaactactggcaccggactcgacctataccatcgtcaggtaagggaaagttcaagggttcctttgtatcctgatagcctactcgcatgctccgcaggcctttgaccgagaaatacgcttcgatggaaaaccatgccatcagtgagtagagaccgtcttgttcacaaaatcaacaagtcaactgatatggcgggtacgtcttgttggtagtcttctgcctgcttctcaatagggtacaattcctaaaagatgccacgcaactctctatcaatacgttatcgatgacgcgagcgtcgttgtgcgagatcctagccatccgtgtgctccgtgcgtaaccaccccggttgccccctcactcgatcagctaattcagcgttgatcctgtgcatctcatatcaggcgggtggtcggagaggacgctggcgctttcaaacctgctcctcatcccctgggcgttgttccaaggcgcatccccggccgtgatcgagagagccaaagaggaaggggacgatgatgaggatctggccgagagcgcggggaacgctttggaaatggccatcctcgggaacgccaagcgattcatccggagtccgagtgctcagaaagttatcggtaaatgatgtcgagtcgatgtggggttgaccggaaagtgggttgctaacggtccgcggactgtacatagagggcatttggagcggaaaggttatctatcacgccgtcagccagcacgccatgatctcggatgtcagtaggaccctggtttcatctttgcttgcttgccccttcaaagctgatgatacgaacggatggtcgagcagaactacaagaagaagccgattcgaatttacaacccgcacaaggcacccttactcgaccattaccggtatgtcccgctgccagccctaggacacccttcgagtcgtagctaaacgtcccgattcgacaggctgaaagtgccgaaagtgcgggcaatcctcgaatataccaatttcatcatccttttcatcctctacgtacaagcgctagaaggtctcaacaagaacaaggtgaatgtgcgggaaagcttgttcatcgtatatgctttgggtgggttccccgttggcatctcaagcggttcaaagcactgatccgcgagagataggtttcaccctggacaagctcgctgctatgcgagaacatggtttgagaggttcgtctcgtcatagtggtctcgagcgcttgaacttaggtactcattctgctcattgtagtctttgctgctaacttgtggagtgagtcttcaactcgtaattgcaaagaccgaccgctggctaataccctcgacagacgggttcgatctcgcctttatcctgatctacatggtttacttggtattacggatgtacggtctcagacatggggaagaatgggcaggagaattgagcattgacatgctagccatgggtacgtgacggcgtcctccgttccagaatggctcaggctcatcagcattggcggcaccaggcgccgtggggatgtttccgagattggcttttgtgacattgagcaacaatctcatgattttgagtctaaggtgagaaattcttcggtcgctccaacaggtttgataagctcaatgcatttgcctttccgtaggagcatgatgagcgagttctttagtgagcaaagcacacccatatcgacttgagcttgtgcaaaccctctattttgttgcagtcttgatgagtatagcaacgttctgtttcatgggattcagctacgctttgtggactctcggaggcggcgattatacttggtctcaaatcggctggtatttgctagaggtgtgtatgtcgctatcccagacttgagttgcgactgaccgcttttcattcgtgataggtctacttcgggctggatgccacgggattccgatcagcctacaagtttcatcggatccttggacccatactaatggtcggtatcagtcggatctaagttttgaatccactcagctgacattgtcgagtaatcacaggtctctttcgcttgtcttgcaaacaccctgcttctgactgtccttgtggctatcttgagtaatacattcgctcacatcaacgcagacgctgcggcagagtcgatgtttcgccgagcggtatctacactcgaatatgtgaaagcaggtaagataccgcgttcttcgctttagaggaagttgctcaaccgcttccgcccgcagacgccgtgttcagctaccagttgccattcaacttggttgccgttgtcatcatgtttcctctgtctttcgtcttgacgcctcggtggtaagctcgttcagctaccgtcgcctttagcccgcttatagcgaccccattcataggttccacaaggtcaacggtaagcttgcatatcgccgccgtgtcccgaagtccgaccttgaccaatcgatcttgccatttgtcatagtcttcatgattcgagccacatcatttcctatcctgctcgctatcgcagtctatgagcgtcaaaaatatcatcccgtacctcttgacgaacgaatcgagagatggttcgatcgaaatgtcggcacatggccgaggaaactgtggaacggacgttagttttctctctctctctctctctcttccacgcctcttatgctttggctgacctcggcctgctagtgatggatactaccggtctggacagctttgcaggggctggacgtgacatcgatatcgtcttcgagatcgagaaggagataggggacttttatcatggctgggacgaggaaggcgcgctcgaagaagaggaagagtcaccaagtgatgatgacgatgacaatccgagaccgccatcctttgtcaaggtctcggatccggtgacaacgtcgccatcgactagcgacgttactcaaatcccattccccagttcatctcccgaagctttgccgctgcctcgctcggcaaccataccggtcggcgcttctccaaacggtacaaacatcgctaaaagaaggcgaggctctctccctaatacggatcgagcggtcgatatctcaacactggcttccggtctgtctccgagaaaacgcagaggcagtattatggaaccgagccctcttgcacgcctgtttgttcgatcaccgccacccgaattgcatctccctagagtcctcggtcatcggtcttcaatgtcaacgtcattggggcagaccggtactcacttccttaccaacccgccaatcattgctagcgagcactacaggcataaatcgttatcaggaatgccaaacgcttcgacgacactgcaaaccattccctctggcaaacgtgtctcattcaccccccctaaggtcgggatggtgccagacaaggaccagatcgctacagccagcgcactgaaagaggatctgctcaaaccggtggcaagtgcagaattgcacgagctgcaggataaattgaacagtattgaacagcaacagaagcagatcaccaaaatgctacagagacttttggctactagtagttccgctgctgcagaaggtcgtcgcaattcaaacatgtcgatggatgacgtctaaatgtattgttgtagggttcttggcaaccatggttcgaaacgcaaaattgtattctttagaatcatcaggcttcaagtcacaaaagccttgccatgtgattggtgatattcgcgtaatgacgatgtgatactgtgtggattatgcagtgatgtctttgctgttgcaagatagatgctcagtcgcgttgttgtgagccactgactaccaaacgtcgaatctgttgggtcccaagtgtggcggtagctctccgttggggggctctgttggaggatgatcttccgttgtaggccttcttggtgggtctcgcggtgggccccctccacccattcctagcatgagtcagacgttgttagcccaatagctggatgttacggtcgaagtaaactttagctcacctcgtcctccgccatcggcagggggaggtctcttgatcctagcaagccttgcctcttccttcaccctgtactcgtatcgctcccacagctgggcatcagtaccgaaggctcgctcgcccaggtcggcatcggaatcttctggtctggaccagaatccgtcgatacccggcgctcggcctcgtagtagcaaaggatgggcttctgcttggggccaggcttagcacacactggtgtcatcggcactgtccgattaatagagactgaccagtcgtgaagacgtaatcatcaagtgagatcagatctggctccgactgtaacagatagtagtactgcgaggcaggaggatatcttgttagatcggtgcaattaggttcggtttaccctgcctaccttgaaagtctcggcaaaaacgaaggactcctatcagaccgaaataaagttagaccatactgactacccgttgaacccaatgactgaccatgttgtcagccaatcgaggcggatacgcgctcacatccgagacactggaaatcccggagtctgcagtgcagctgtccatccaagacgtgaacatcctccaccccttctcctgccatttcttgtctccggtcagacgatacctataattgctcttggtcagatatattgcacggtctggaagcaaggataactcacatgtagaagacactttcggccgtttcaggccttccaatgtagacacgattcccgctcttcagaccaggtggattgcctcgaaggacttcctcgatcagtacctcctcatctccgtccgcgtcgtaggttccaaggggaaccgtgacgttttgataggcccaaggctcgtccgcggtatgaaaccaaatcttttcagcttgtaagccgctcgtggaagcagcaccctacgaaaagatggtaactaaggattattgcggctttgggagacaagtttctcaccatccaataacaagtctgcgtaagacgttgaccgtaaaccctaacgatgaccgatcttgttaatgccaggagggtattgtacgccaccaaggcgcaacttcgaactgacatgtctttcgcacgatcgagaaggcggcttccaagccccaacattcctccagcaaaacaagtctagtggatttctggtcaatcagcttgaactgcttctcatgggattgatccagcctaccagatgctcaagaacgagttgctctgagaggaaacatcaggccgagtgtcgagacggaacatagttccatggtcggtcggtcactcactcatactgtgattgatcgatccaatagtctaaggagccacaattttcgaacctgtcagaactccatcaggtgtggatcgaggaagaaccgaacgcaccatgaaatttcgtccagggaaaacgtcgagatccatgaagagcgttgtttccgctttatccatcgcctcctcgtacatccttgagtactggtcggtcgctccgcccacaagctgatgttgcttgatgaggtattcgtaataagaatcggctaagttaaattgaataaacgggttagctatgtatcggtgaggcagcgagcacaatcggcatacccatgcctccaaatgtataatctccttgtacttgtacgtttgtgcgttcgacctgactgtcaaaggccgcggggaggagcggcttcatgtctgatcgaggaatgacgacctggtcgaggtaatcgatggcgcgttgggctcgatcaaagaaccatcggtcgcccgtgacttgactcaaacgggtcaattccaaggtcatgctcccgacctctgccaacgagacccttcctgatggaaaccagtcttgatcgctccccgcatcgaaacgcccgagcaccaggcccgagggtgagtcgaacccgcgtcccaggattttcccgagttcctttgctcgatccagcatgagttcgtccccggacaaatcgtatgctccgatcagaccacccaagtatcggattcccatttcaaagctagcgatatgtgcaaactggtcgcgtccagcgcgatgctcgtgcaacaaccattctggcgtgcccgcagtccgctcgagcgtcggactgggtcgatagccaaacgcccagtctttcccattgacgagtcggaaatcgaccatattgacgtgtttccggcagagatcgtattccttggacagacccatgatcaagagcgtctccaaagaatcgatgatgctagctccccagttctggaatggattcgatttgacgccgctgaccggccttacttcgtcgtggcctattgagcgaacatgatcagggattactcggcagccaacgttacggctgaaatccaatgcgtaccccatgctttctccttgtactgctgccaggcatatgcaaacgcccgccgaacagcatctctcctaccctccctcagcgacctttcctgctcgttctcctcgattcggctaaagtcatgctgaactctaggcatcgctttctgcccacctccgcccgggtcgaaccaggtcggactcttccatgtctcgataaagctaccctcaggcaacggccggctggtcgagggttccggatctcgcggccgcgaagttggcggaggatatatgtaggtatactgatccaccgggaattcttcaagtgtgggagcgggcagagtgaacgggtcgatatcgggaaagtactcgtcggccgagggtagcgtttcgggatccgggtcatcgggggacagttcgagagaatcgagcgctgcttcgatagctcgatctctcgcatcgtcattggcctgttcttccaattcttccgatatctcctgattcatcggtgatatgccttcatcgtgctctttcgagaccaatcgataggacaggcagaagaagacgaccaggctgacactcgtcaccaaagcgattcccttcaaccgccggttaacgtagcgtcgagcaaaggtggaagcgcgcattgccgaagcgttggattccacgtcgttcaacgagctcatggcatgaattccaagtggatcagctagtccagatgctacttgcgtatgtgcggcctttacgaccttaccttgccatcacaactcgtcgagatgtcttctggctggctcaacctgtctcaaagcttggcatgcagcctcggtcgaatcggaatcggaatcggaaacaaatttgaatccgattcggaagcaaacacgatatcaaacagcagtcgatgacggatctttcatctcctgtgcatctccctgtgatatacctcatctaacgagacgtcctcgtatgtagacgcaactttggtctcgagcaaacgagctacctcgactaccctgatgatcaaaaaccatgcgatcgacctagtcctcgtccggatccggctccgttacgatcagatgttgacggcctccttgccgacctgagacccagaggtgtcgacaccggtaagagataccttggccgccaatgccgcatcaacggcgatcttgaccttggcgtagacagcgggaatgctgtccgtggcatcgacctgtcatacccattcgattacctttcatcagctcgctccatatttgtacttctggagcacacgtaacgcacctcgacgaccttgttggcctttcggtagtactccacgacaggcatgctggtctcggtgaaagtgcctgtcacgtagatgttggacgcatgaattggtggcgttacagtatggtaaagcgcactccagactcacgaaaacgcttgacgatgctctccttgttgtcatcttctcgaccgctagtcttggcccggcccatcaatcgctcgagcatgacttcctcggtacacgaaaagaacaggacaaacgtcgattcgcaggtctaacaaaatgggttcgtgcaagggtcagggccgatcgaccgtctaaacccttgaacagacgacttggtactcacggatcggtcgaattcgacggcctggtccatctttctggggaacccgtcgatcaagaatcgtcccttgccatcttcccaaccgacagacttgggcgggttgttgatcgtatccctcatggcgttctcaaggagctagaaacccgcaaggtcgggcgccaatcttaactctcggattccgtaaatcggattgaatatcggactgaccttgatggtgacctccatagggacgatgtttccctctcggatatatttggagatcatctcgccgaattccgagccgggacgggcctgttcagctcggagcaggtcaccagctagatgttcagagtggggagagcgggaaaatttgatgacgatcgcatagacgacggtgaggttgtaggagacgggagggatcgaattcggcacggaaatcagtatgtagtggagcggttctgctgtatgacctgttacttaccggagaggtgtgcgaacccataatcgttgaccaggttctcgcactgagttcccttccctgagcgaccaattcgtttcagatgcggttctatacggtcataggtactgggtagacctggcacctaccgacaccgggtccaccgagaacaaagatgacggtgatgtcgttcttgtcgaaagcaggtccgttgcttcctccaacagcgttcttgagcgagtcgatgacagccatagtgtgaattattaatctatcaagaatgtctgggtatgattcgtagtcaatcgggtattgaagccgaggtgcatgaccacgaccatgacaataagatcgttgacatggaccgtttgatctggaccggtcgaggactccccaggaaagcgggagcaaaatccaaaagtggaggcccaacaaaccccgccctccccatcatgcctcgaagggccacaaccttgatctcaagtttgcgctcgatagtcgtcggatgtctacgacaagtctcgtcatgcccgacaactttatatgcatgtacaatcctaatcgatctcctctaaccgatggacccaggtcgttcagctggccggcgcttcttcctcttccacgaaaatttccttgtatcgttccagtatcgtctctacagcctatcacaagtcaaaatcaggattagcaacagcctgtggggtattggcagctacgacatggacaacactcaccttgcattggaacgacatgtgctccaagttcatgccacccatgctggcaggagctccaagcagcgtcggcccaaatacgatactcaggttcgagaccgacatctgattgactgattcttttcgtcgaatcctgagcgtagggggggtcggaaaatcggtcagcaaagtctcgaatctagctcgaatcatgctcacttgtcgaggtgacccatgaaaaactttagcgtggcatagtttgcgtccggcagttcattgacttgttcgtgtaatcgaatgtgtcgtaaccggtcattgtcataacctgaagccgcgaggagagacaacgaattatccatcagcatctcttccaattccctttgacgaggtatacactcacgtgcggcgtcgatgaacccttgatatagtgcatgtgtcagcaggggctcgggtagctcgcggaaccactgcttcagaacggaagccacgacattgatgtctccgctccattcgtccgacatcacgtcgaccgcgtccaaatctatgcgaagacccacatttcaagctcagctgagtgagaaacggtccagcacgtgctggttctttgcttaccggcgtccagagctgccttgagcttttgcactttcgaggtcgtgccgctcagacgataaatacccatctgatccaaacctgtctcgtgaaacccgtcagtatgcggtccaggcccgacaaggtcgaggttgctttagcctcaccatatgcctcgatagcctgagcgcatttctccacgacttttggtacttctgtgccttcgctgacgacttgttcgctaagctcgatcccgaatgtcgagcctgataccactggtggaccagggttgtaagctccgggaatgatcggcatttgtgaagattctccgtggttagcggggggtggctgtgtttgagctatttgggaagcttgcacgtgaggcggtagggatggcatctgcgagcggtgtttcttcggtcaatggcacgatcgtgagagtcgacaccgatcgactcacgaatccgtcctcgtatgggccgtcctttttgggcgctcttgccgctacaggtccacgagcggcattgtaattttgcatatacttggtaaagtccgctcggttgtcaatcgtctcgacgatagctcgaaggccaacagctgcgagccaattctacgtaagcgcctgatcgaaccgagtcctcttcaatgcagactcactgtcttgaggcaaagcgggagctaccgcggtagcatcggccaagatcgtcgactcgtacaggtaagcgtatcgagccatgtgatactgtgtacccatgtcgatttcgtcggcgcattctttgaggagctatgcgatctccaggatgtcagccgattgcgccatcactcaagagacgacgacgcttacccggagaatcttgggcaggtggaggttgaaatactcctgctttgcctgctggttgctctggacagcctttctgaacacctcgctcgccgaattcatcctctgcctgacctcgtcctcttgtctttgcatctgcgccggacctttgctcttgaacagcataccccccttggccatggccttgcccaatcctcgtttgtcccgtgatgacgaacctggcgagaccatgtttccgctatcgcgtacgttttcgccctctttcgcgatgaggatccgttccaactcttctgcggtcgtatcgaaccggctcttggcctgcacgaaaagcgatacgatgtttgtcaggggatggggccgcgaggggacgggcgaggttcatggactgaccttttccatgtacatttccgcctcttgtacattcctctcgtaccgcgttccattatctttgtgctgtgtcggcggaacacggcaagaccagcggattaggtcaatttcaggcaccaaaccacagatcggcacggctccgtaccagctttctcaacctctccccctcctttgccaggttgacgagttcctcgctcatctcgttcaaccgggcggcgaatctcgaccgattctgcgccagcgcttcgtgcacctcgagagactttttgtacgctcgtacaaaggtcctaggtaagcaagaaggggctccggagggtcagcttgcccagtccgaacggtcggaccggcttcccgatatttcactgacccggctttgcaataccctctggcataactatcgtcactcatcctctttaactctagtccgctcctcgcatacttgtcctctagctcggatcgagaacgcaagaacgcggcgaattgctaccagtgcgagcctgggatgagccttgggtgttccttgcagccctctgagtcctgtcaaacgcgcgggggactcactttacacgaggcgatgctctgttttatccgctccgtgatcaattggagggcgtactaccgaatcgtgcacgaaccgtctgtcagaatcgtatcgccgggggaggagaggaccgtgtctcgccctctctctgtcgcccatacggaactcaccggtgaatcacacaaagccctcaagaggccctcatcgaacgtgatcggttccctccctttgtcatccaatgcgcctagggcgaccaaccctgccaacccgctcgagctctgtcggttccccatcgatggcggatggggcaccatgtcgacttcctgcaaccgcggggtctgggcagggggagaagaagcggccgaattgatccgggtatcgtccaggggggtatcgggcacgttggtgctattgacagggatagccgtcatctcgctcctagcgctccccgtactccctcgtttctgcctctcctcctccaactgtagatccctctcccgcttgtttgctagctcaatcttttcctcttccaagggtttcgaaaaggacaagccgtgtggggacgaggtcgacccggggaaagaagaaaagacctcgtcctcggtcgtccgtctctccccgccgaccccctgtgagcctgcgccgagatcctgggaagacgtcgaggtggaggacatccggctcgtcgtgctgctcgagaacgctcctggctggttgggcgagagggacggttgatttcccgggtaggcggacgggtcgaacgtctgattcccgtacgcaggcgagggaacgctcggcatcgatccgttcgggttcgagcttgaggaagggtgggagatttcggtctgtccctgaggttcctgtcgatcctgcctagtttggacctgtaaccccgccatgtaatcgtccagatcatcttccagcgaatgtgcccccggcgcagacccggtcagatcacccatcgtgccctgcgcggggtacctcgccgaatggggtggctgtttatacaccccgcgagtgggttcgtcgagcatgacctcttgatccgacggtcgaggttggtggcctagcaccgggttgggcgggttcatcatgaattgattgacgatcgtggattcttgcgaagacgagtagaactgggcgttgttgctgttgaattgctggctcgtgctcgagtagacggacgcatcggattcggacgagtggtgcgagttgacccggtgcgaggtgttcatcgtcggtcgtgctgccgagaacgaggtagccgtgggagagatcgatgacgaggctgttgctgctgctgatgatgatgcgggacctgcaccgtagtgtggtgtctgatgaaactgttgctgcagctgccctgactgcaagctagatgttcgcgtggattgagtgctgtaatgagggttaccggaagacatgtcacgagcggctgtacgccaaggagtctgttctataaagaggccaccgcagtgtgttatgactgagcgtgcgagttagacctgcaagtaaacaagagagactagacgtcgattgcagttatgttagttgctagttgtcatatggcatatggcatatggcatatgggtccgaggtcgtagctgggtcgaggccaaagttgctcgtgcgcgagtttgagcgggacaacccgcgattagggcaggtcaagtcgacggcgatagacagatggatctagagtgttgcgacacagaataacaaggtacaacaggatgaacatggtcatggctagagaggacaaatgcttgctgttgacagagtaatgaaaagtgatcgtatcatgacgtgcatgacaagatcatgggagatttcagcgtttccgaatccaacgagcgagggcagctcccgcgaaacggccctagccccaactcgcgacattagccgagcgacctgacctcgttcaacttttctcgtactgtattcaatctcgacctctacccgctacccgaagtcgtctccacccataccagcacttccacatagtcgactgcctcgttactggattcaccttggttcaaaaaaaaaaaattaccacagctaacaatgttccgctcgaccaccctccggaccacctcgcgatcgatcctcgccgtacgacatgtcccctcgaccccgagagcgttcatctcgagtacgaccgtcttgcgtgatcaagaggccgcacaggaggacatccggtcgaggttaaaggccgcgctcaagacggccatgaaggccaaagagaaggataccgcggggaccatccgggtgagtgcacagactcgtctacctctgtccgcttcatccactgatccactggaccgactggtgcacgatggaccatgcatcttgaccctgggaaacgttttcgacgtcacgcaggcgatcatgagcgatatcacataccacgaaaaatcacaatccgatccgaatgccaaggcgagcgaggataccgtgattgacgtcctccgtcgttccgtcgacaaacgggtgagtccggtcgatcgaggacagtcccggggatgatcatctctccgtacttgtgactaaacctcacatcgtctctcccgatcgtcacgctccgctagatacaagcgtccgaatcgtacccggcggatcatccgaaccgatcgaccttgtccaacgagatcgagtacatctcgtcctttctcccacgcacgctcgaaccgtctgccatcacccagatcctgagcgggatcgtcagtgggttgaaagaggacgaacgtcagtccaagggcgtcaccggcaaggtcctcgagaggttctgggaaggggtcaccaaggggcaagtcaaggacaagaaggcgctgggcaaggagattggagagttgttgaaaaaggttcaactctagagagcggttccgcaccgacaccgccgtcgttggccctaaagaggaatcaccacgacacacgctgtatcaatacccacgtcgctcctcctctaccttgccaattgcatgtcccgacaccttgtgtccacccagacccgatcaccgcattcacgttcccaatatacatgaatatcactcccatcttctccatggtgtcgtcccccgatagaactattacatccactcgtcccttccccatccgactcgttcattgatcggcagggcgcatcacacacaccgacgcgatcgggcgtgctcaatgagagttctcttgctgccaaggcaacagctgttgcgggtcgtcccggccggccaagaactggtgatagtaacagatgatcatggaagatagatgatgatggttcgaagacgaggtcaggtgttagtcagtcgctgtatggcgctcgtaggtgtgatggggaaggcaggcgtaccttgtccataaaagtagtaggagccgctataaacacccaaggaagagaccatgaccatgtcgagatcagcaagggatattctacgaggagccgaaaacgatagaggaggctcccaagtcgcatcgcttgtgggtacttaccaggagtctgagtccggttgagatcagggggtgcgagtggaagagagagttgcgagagagtagggaatgaggatcagcaaggagaccggttagctcgaaatcgtcgcgagaggacggcgaaaggggggagggtcgggcactcacctcccatttcttgaaccagtccatcacgtgggcctgccgattcaaagacacggatagcaggttagtttgcagtccctcagaggatcgtcgtctaggaatgttcgtgaggggaatactagggcggtgacgccgacgctgggcggcgggacgaaagatctctttccccctgtaccaccgtcgcctcgcgcccacgcccacccattctccccgagtagacacgcacctcggtcttccaacagttcatcgtctcctggtactcctgcctcgacttgaagatcaacatgtcgatgacgttgaggtcggagatttccctgtgtcgctcgaaatcggctcgtttctttacgcggatcatgctaggcgagatgttgagcgcgtagagcgagacgatttgaggggcctgagcagagcaagaggaggggtgcacagtatctcaggtgagtggaaagtgcaagcggcgcgggcaacaaaggggcataagaacgccgtcgacgacttacggaccggtaccagtcccggtagagggctcggacccgttgtcgggcgatttgttggctgcccgagatggccgatacggaagcgagacgggatgggatggtggtcatttttgaatggtatgtgagcgagcgagggtcggacggtaggtaggtaggtcgtttatgatggttctcgaggtggatgattcatgatacctatctgaatacgggagtgtccctgttggtcgaatgagtgagtgaggtcgagaggacgcaaaggatcaacctgacatgttttgttgcttgtgtgtgaagagtcgatcgatacagacagaccagtcttgatttcatagacatgtatgcatatctgcactgcttccactcagctagacctcgacaaggtacaatcaaacatacgtgaggacagtcgcttctgagaacatgtcgtcgaccccgatggaaatcatgaccagcccggtagcaggaccatcatcgcaacccgacaccgcctttgagaagtggaggtcatccctcgctcaattgacgggactcggtttgaaccccgttcaagccaaagaacgggatgaacgactggctcaggagaggctcgagggggattggaatcagtgcgagaaatggaagaacgggctgatgaaaaccagtgagtctcgcccgtcggcatcaccgccgcagatattattgctgctgctgaatgccctcccgcgttccggacgcgactcgactctgcaggcccagccgtcgtattcatgatgaaacacctcaccctctccggctgtcccttcaccgccgcttcgatccagtgtcatccttgccctccgacgagatccggcgggttctccccggaccacggcatcctcctgtgtcaagaccggttcttcagcaagcgacacatggaggacacgatcgtacacgagatgatccacgcgttcgatcattgtcggttcgaggtcgattggggcaacttgcgtcatcatgcttgtagcgaggtgggtcccgggcgtgtgtggtttcgaggtaccatcgaccgggggtagctgacaaggataggggtgggacggatgatctgtgtcgggggggcgatatagatccgatcggccaacttgtccggggattgtaaatggacaagagaacttcgaagaggtttctactcgttctccaaacaacaccaggtgtgcagtccttttcgtcatctcagtatccgagcagacctgacttcccattccatcctccgcctcaccctcttcccgtatttcgtcacctccgtcccttcccctccgacatcccccgcacaggcatgtgtcaagcgacgagcagtcttatccgtagaggccaaccccaactgtacggacaaggcgatggccgaacgagcggtcaacgaggtctgggatagctgtttcaaggatacgcggccgttcgacgagatctattgaggcagcgcagggggccaggccgggcacgttgggtcgttgggtcgtcctcccgtcaagatcagggagacggtgacgtggttccgtatctctatacgtgtagcatacagcatggatcgttcgcatacactaggcaatatttcgtaccgcaccccgtgtgcatgtcctgtcctgagagagaaaggccagggctgacgctctggaccgtgctgcagcgtgaagtcggttctttcgaaccgcgacgacacgatatctgctgccgagaacgaatggcctgaatgcgatcgatactgttgactacacgagaccctgcacggagtcgcagtgcgctcgtcaccgatgaccgccctatcgaaggcatcgcacgcagccacagcgtcgaaacagctcttgcagcaggtgacaattcggcccacccgctacctttgaacgttttcgcctaaaccgggccttgcctgaaaatttccgccatcaccgatgtatatgagtacgatatgatcggcatccttagctgctctgctcgatctgtgctattcaacccagagtgatacagaccaaaaggacctatcactagtaggctaaatcggaatccaatttacataaggaagcgcagggattcgaatcccatggccactatagatgggaggtcttggtgtatctacagtcgcggttccgcctatgccggatcaacctggatcacgttgatcgtcgagaagaaacagcttctttgctgaacaccatgtcggactcgacaacgatgatcgttagacttcgtccatggcccatctgacgaattcaatcggcgacccttttcggtgagtgccacctgatgccggtttaggtgttgacagcccgcaaagctgggaggcaggattcggcgctgatcatctggtacagtaaggcgtcgaaagtccagctcgcttcatcgcttacgcaaccgagatccgcaagctctatccttccggctgaccgggattgttagtactctgctgtgaagtcatatttgcacagttatgcaaacgagtgtaagtattggccatcttacttggagccggcataagcaacactatcacaacaaaacctcgacttacattcacctactgcttcctctttcttctcttctcctctggcattgtctcgacaaaaacaccttcagtctgggccgtcgccagagctttgagtgtggcttctgtagggagtcgatttcgatgctgggcgaggttcaggatgactccagcattgacagcatgtaccatcgactttcggttggcagcagagaattttgaaggctgccggacgaggcacgcttgctgtaaggacttcctgtccattacacgctggtggagaagtaagcccgctgtcaagcctttgctgtacaaacagtcgcaatcacaaccacaattgctcggaaccatcacaacatcaccaacaccaacatcaacattccaatatggttttcaacgttttagacttcctgttcttacattatactattcgcctccggcttggtctccgtctccgtctccgccatcgtcttgttcctttcgggccccaatggagaccttaccggtatcaagcttcattctggcgaatggtcagtaacggcggcagtgggtgatgcagttgagcatgcgttatcacgcgatgtgtttatgaggttagcttgaaggagccttcgcatatcctcattgtgccgggcctggcagatcgcctgattctccatggaacggtgatgggaaactacgaaagtgcgcgaatcgcttcagctgtctcgaggcttgctctgccgctgactgccagcagtgccaaccactcaccggcgatgattcgttgcttgaggatatcctcgagactcagccgcttgaacattcaggcgctccatgttggactcgactcggccggctcaagtcgtcaacgatgatctgatttgccaccctcgaatatgctcaagcccctagacgtcgcgacgcgcttctaattggagatcgaccgaagcgcgagccggaaaactcgtagagtcgtcatcgccgggccagaatgtcgaggttgatgtcgaactgaattccgatcgcaagatcaatcggtactgttctgccctcgatcaagactagaagactcattatatagaaaaatgcctaccactcaacaagttgtcgtcggatcgctggccgttttggctacctcggccgtaggatatgccgcctactttgattacaggcggagaaacgaccccgagttcaggaggaagctgagtgagttgcccgaacccgaaatcctgctgcgttctacaagagatttgtaggagtatcaagctgatgaaatttgatcgtgacacagagcgggagcacaagaaggtgcacgtcagtgctacccgggaggctcgagagaacaaggccaagaccactcaagttcgttcctggtactgcaatttgaccaagttgacctgcaacctaaccgcaacatacgcaactacgtagctcctcaaggctcagctcgtatcgatctccaaggaggctcttcctaccaaccctgccgagcgagaacaatacttcatggagcaggttgctatgggagagggtttggctcaggctggtacgtccgttcggaaagaactcagatgaaccatacgatctgacccttacaactcgtataggccccatgaacgaggtgcccgcggctttgtgcttctacagggctctccgagtctaccctagccccgtcgagttgatcatgagtcagtcaaggcggcggcttggcaacctagtctgcagtcaactgatccccttgtctcgatggtgctgtgcttgatacagtctatcagaagacggttcccgctcccatctttgcccttttgatggagctcacgtcgctcgacgtttcggccggtcagtctggcggcgcccctgccggacccactggcagtctcgccaacatcgatgatgacgaggagcccgctactatcgaggcgtcgactgcgcctgccactaccactggaggtagcgaggacagctcgcctagtggcgatagggaggccaggagcacagccagtggagagtgggaggatgtcgaggagaggtcctagacctgcgcgatctgccccgggacgatcaactacgacgcagccggagctcaagcgagacgacgggagggcctggcatgacaaagaagaaagacgaacagagcagacgtgccaaccgcgacactgaatccaaaggaatcagtatcgttgccatgacgttcgattcacggggatcaaagcgaatatcaaccgtatcaagacatttctcacacacctgtattatatcatgcttcgagcgattgtctttttgtgttccatgatcgttaacatgctcgtcattgtcaatgaccagtactgtccgcttggtgtttccacaatgcgaatcatccgagatacgttgcatttctcctcggaaagacagccaaacgttgaagaatctggcttacggaggaggctggcccaaagtcaataattacgcgtctcggtctcggcgtgacccgccgccggccgttccggccggatgatgaatatggtcattcttgccgattgaacgaaaatgacttgatcaatcggtaagcaggaatctcgccgctacatcgttagacaacacgcacaacacataaagacctgagcccgttcggtgaaacgtccgtgtagtcgagaagccatcatcaagctacgggtccggtcgatgaatacgcgcacgtctatatatatggctatcacaggatcactgtcatctgcacaacccatcggcctaccatacgctgaaaacccatagaaacaacgagtgacgaccgggattagaattttcaacatggaaaacagaaggccatcgaccatcgagcctgatgttgtcgaagtcgtttcagcccgtatgggcgctatgaatgcggcaagtcaagcggcatgaaaggggccgggacgctgcttacaccgatccgctcattcacagacgatagaggatctggaggatagcttggtgctgctcaaacaggctttgcaagaaacgaacagccaggctagtggtaccagccgacagcttggcgcggtaccttcgcccgcgatcgctacaagcgggcctaccgacaaacatggcaagagaagcaagaaggcaaaggcaaagagcatgatcgagattccgggagctgggctccggagtaagtccaacaggaagctccctcgatcgaatggctggacacagtgctgattacaaggtatatgcaaaggacgccatgcttctagcccagatttgatgaaccccgtgctgaccgaggcgcaacaaactgatggaatgatgaacaataatgcctcgtcatcgtcacataagcacaagagcaagtttcgtccacctcacaagagcaggtctcgacacggcagagggatcagcgtctccgaggatgaggcgggaactatcaaagctggcagaactagcgaagctaccgatcacctgactgcagggaggaaggagatgccccgtttgcacagtggatccggtgcaaaagccatgtttgagagcatcttctaccgacgacgtgagttgcaggcgaatcgtaatacctagcgcaagatcccagaaaccgatcggtattttcgaacggttaaataaacatagccagccaccatcgcagtcgggcaagcacggtgacgaccgcttccacagacatcaaaacagcaaccgtacctcctcccgttccttctatactaagcggtgccacaccacgaccatcgacttcaacggccacgccaccacctcacctgtcggtcgacgctctcctaggtgaaattacaacggccgtcgagaatatgaggcatcaacattcttcgcttctcacgttgctaccattgtccaactttcacaacgtgctgtcctccacagaagagagtagtacaccgtacgaatcggacgctaccgaagggagactatctcctaccgaaacgaccagacccaaagcgtatgatgagagtgctcaagatgaacatacccgagcaggaagtgcgtctcaaccagctatcagcaggcagtcaggccaccgatcacgggcatcattgtcttcgctctacgctgaggtcgcttcagtatactacgacgccgaaatcgagccgtacgatgacgatgaagcaatggatcctagtcaggggggtcatggacgaacgggttcgagggatagctttgcttcgctcgaagtcgacaggcatgtggagcgggccatgcaagacttggaggaccgggaccgccagcgagccggagatgaagagggaatcgcccgagaagcttccgctcgatactcagtggacacccttactggccctaaaacacctaccatggctactacgttaccgtccgcctcatcggggccaataatcaggaggacatctctacccgcgccgtcgcccgcggcggaaccctctctcatcggaatgttgcgaaagaacgtcggcaaggacttgagtaccatcagtttcgatgtgactttcaacgagcctttgagcctgctgcagtaagtattcagcaatcactcagctccgagcgttctagtcgtctgactttccgccgtgtacctaggaaactggctgaggaggtcgagtataccaatttgctcaagctggcgacacaggccgtggatccaattgagaggctcgcccatatcgccgcatttgcggtctcgcaatacgccaactcgaaacaccgaacttcacggaagcccttcaatccgctccagggggaatcttacgagttagtacgggacgaccttggtctaaagttcatcagtgaaaaggtcacccatcaccctccaaggatggcatgctatgccgagggtccagaatgggtatatacttgtacaagctcagctaagaacaagctttcgggtgagtgatcacagcctcagcgttgcagattggcatggaacttattactgcttcccgatcaggtatgagtctagagatccagccgctcggtactcagcacatcattttgaacgggaacgaaaggtattcttggtgagaaattcagtgcaccgaacgtcacctcaacgtcattctaacgcctatctttatttctcaggacgaagcccaaaagctatatgcgcaatttggttgctggtgccaaatatctcgaaactattggcgatctgaccattcacaacgagtctacgggcgaaaaggccgtgatcaatttcgaagctggaggatgggcgggcaagaggaaccaggtttccgggatctgctataccgcgaccggaagcaaagctgcctggatcgatggcgtatgggattcgaaactgaacgtccggtatggatccagtcatgaccccagtcatccgctttggcttgccaacccttggtaagttgaagcattccggtccaatcgccaggtatgccacctgatgacatgctgattgtcacgcttgtcaggcctacaaatgcggacaagaactatggcttcaccgaatgggccatacaactaaacgagctcacaccagatctcgcgggagtagtggctccttccgattcgcgtcttcgaccggaccagagagcctacgaggaaggccgcatcactgaagccgaccatctcaagacggcactcgaagaggctcagcggcagaagaagcagatcgagggagattacatcaagcctagatggttcaaacccattgcgcatggatcaggggaggatgaatgggagtatgcaggtggatactttgagagccgagcggatggcacgctctccaccaaggccataggaaacttgtttgagctttagagtgtgcagctgacctcttgtaaggacgcgcaacttttcgacgcatgtattcatattgtattcacatcctaataactcgagttagactgtatttaatgccagccgaacgtcatcacgctgaaagaccagcttaggggaccggatttttcattatcaggtggcgatcctgttaaaagcggtcccatcaagccttgcgatatccatcaaatgtgttcagactgaaaaagccgaacgttccaaccctacagaaccaaacatgcaggggatgatatgattgtaaagagtacttggatcgataagttttgaattagcggattcgtcattcttgaatatgctctacgtcggtcgacagcgcgacaccgcgggtctcttgcactcgcgccaaggcacctcggccccggtccaggtcatgtcggccatccaggcaggtcaaactcggtcgtcgactgggtacatttcggtggtatccctttcttcccttctgcttctgcatctcagatcacagtagtgttccgctatcgacttattgattcggaacccgaccacaagtcatagagcatcgcgatgtctgatctgttcaaagacatcccagagtttgtcgaggtgagtacaactgtcttggccttggagctacgacttcagcttacaccatcctgtagctcgacatcggcgaatcgttgacagcaaggacggaaaccctttgtgagccgttcgtaagggcgtcgcggagttgccatcgtgctgatcgatcgcgtgtccagctacgttccgggagcttggtcctcctgatctgtgccatgtcgtcaaggtgaccgggtcgaagaatgctatcaaagaggtcagatccccgccatgtccataagcctgcataggtgtttgtgccccgaagctgatatccagatccatgtcgcgatagattggctcctatcactactggtacgtcctgggtccagaaacagctgcggaatccgctaatattttctgccctctctagctctggcgtggaagcgtcttcttcagcactgttggcagcatatcttcattccttgacgttctcggtcgaagacaactctgcgtggttcagtgggaagagtgccaattggaaagttcgaagtgggacatactggtcagtagtctggagtgcaatgcacgactgcctgtgctgaagccttggcttgtcacgaccgagcagctgctttaatgccttttcccgagtcgacgtccgagtcgaggtgaagatcccaggcggagtggaggcatacgtcgtagacctgcgtggagaacggtatgtacaggagcaatccggccagccaaggcgtgacgcttgatctgatctgccaatttcgctcagcctggaacccacgccagcaatatggcaggagacctatgtatcggcattactgagagcgatccgttatgccgatgatcccagctacaggctcgctgggtaccgaaagctggatcctatcactacgccggaagccgagcagaggtttttagaagctgcagaggcggtctttttccgaggtaagacaagcgatatctttttcaatctcgcacaaactctcagcttactcaggaggactgtatcctcaggctggcaactcggctctgaccctgagatccaggttgctaccgtcatatcgaaccacttgacggccggtatcatgaaatactttggcgattcttaccggctccagcatgctgcaaacctgttcgaaaagctggtcgacaaggagccagaggtggcggctttgctcgccaaaagctacatcggaatgagtgagcatttgtggttcggtatatgccgcccggatcttgctaaattaatgtccgaacatcagacgaggaggtcaaggcgatccaggtcctttctgctgcgcttcaccagaacccgcaatcgtaccatctcctccacacgcaatgcgactttctacgaaacaagggcaaaaccgaatgggcattgaaactagccaaacaggccgtcaactgcgcacctagcgaattcgtaacatgggcgaagctgacggaagtctatatcgatatgggcatgtacgactcggtaagtgcactcgtgtttggacgagcgccctgtctttgaacgctgaactcgatccggtcggacttcatcaggctcttctgaccctcaattcgtgccccatgttcacttttaatgagagggacctgcatcgcatgcctacaccacttcgaacacacctaccgatcaaaggctttattgcggcgtcaaacatcctcgacgaggattcaggccgagataatgaagccgacatcgccctcttacggctaccggcaccaagtcttcgggggactttcgccaaggcttacagtctattgaccaagctcactgcccagatcggttgggatgagctactcaggacgagatcgactgtgtttgtgatggaggaagagtacaggaaacacaaagctcatgcctcggtcgacggggacatgacgcctcgagcgaacgatatggtcgaggataatgcctccaccaggggggtacgatcgccccgcccgatgatgcacatcaacaccgatcttgcgggttcgagccgggatgcgcgtaacaatgcggatgaacagctcgatgtgccgcaaactcctattccaaccatcaagatctctagcgagtcggatcacgaacgagaacatgcagctctcaaaaagatgggcattcatgcgaatggtggccctgacacagtaccctctcctgttcaagaagagaaggaagaggaaatgcaaaggtcgatggacctcgagctccaggctgcttccgagatcacgaagcctgagcaggtacagccagcagacgaggacaggaaggccagtgaagcaggagagacccccaacggtgacaacgcggctggggaagtaacgagttctcccgaccagcaagacggaggatcatccttcaacaacaagcggttgtgtgagcgatggttggacaacctcttcatgtcattatacgaggtatgtccaagcactgagaggctgatcgatgtcacctgctgaacggatattgtcgttactttgccaggatctccgtgtgtacacaatctggcgagcggaaatctctcacttcaagacgcagcatatgtcttatcgcaagacaggtacagaggtaagccacatcgcaagcgcgactgtgagagggtgtcagcgttgatgccccagatcgatctagtgggagatcctgggagagctggctcagcgattacatcacaaggaagaagcaaaagacgctttccagcgttgtctcgatacccgattctcgtccaaagcatgggtcaagttgctagagtattacaccgaagaaggggatctcgatcgagctctcggagcagcgattcgcttggcgacgtaccaaaaccggtcagtgtgatccgtctgaagtcgatgcgaacgtacaacttatagcgatgcacatcgggcaggtggtacatggagtcaacatatcccacgatagtcgctcactgcttgttcaagctgggccagatcaacggacatcaaaagatctcgtacacactgatgagcaaggtcagtcggtcgtccatgcttcagcgaaagggtgtggtctgattgcatatattgctgtcgacccgcatagaatctgcctcagggcatcgccgagatcatggaagcctacttgaaatatggccagctgttcaaggtgagcatccgaccttgctactccttcactatgcgccggttgtagctcgaatggcttacttatcgactcgattgtttttgcaggtggagggtcacgacttttagacgaggatttagagtatggatagactggttgtacatctactaggaagcatatactccgacgctatgatatcacgattcaaatggaggatatccatgctcaagaccaggtgcttttcagtctctgcgatgactgcgcgagggtgctggcgaagagctgatcaaagagcatgtaaccgatttcttgactaacatcttttcttccgcccccttcatggaacggggcgtgacacggggtggagaggataattgtgtggtatatgcgatgctgttgccctaaactcggacggcctgtagcgggtcccaagcagtcttccgcaagtgcgatctttaccctcccctcaaatgctgcctgaccagcacccgtttttcattgtgaaacgacctctgagctatcgcctgcgattagtcatcgacagggctgtttgatttcaatttcatcaggaaagaaggaagaccactgatacaaggacaagcccgactcccggggaagccggaaaaagaaggatgtctggctgaagatcgggctagtcttctcccatggcaaagggggtggaatgtaaatgggaaaggggaggatgaattaggtctgcgaggcgagcgggggaggggggacgaggggttttcttgtgctgctgtcctcgatcggcttaacggtagaactgcatgtagacggaacggggaccaggtgtgaatacgttgctcccagactgtaccatgcgtttcccgagtgtcgcgctcgcggactcacgtgctcggattgcaagttggcggcgatctcggcctcggctcgatcaccgttggccaggagcttttccttgttgtacaagagctcttcccgggtctcggtggcatactcgatgttagaggtctgcacgtccgggtcgaggcatggaggtaagaaatacgtgtcagcgaggggtgtttgcgagtgacgttgcccatgacagaacggtgggactgacctcgacaatagcgtcgacaggacaagcctcctggcagaatccacagtagatgcactatcgagcggcaaagccgacgttgtgacgtatcagctcaatcttctccagcggcgctccgtatacgccgagggtcaagacgactcaccttggtcatgtcgatatcataccgggtggtcttcctgctcccgtcgtccctagcctcggattcgatggtgatcgcctgggcagggcaaatggcctcgcacagcttacaggctgcgacaaatcacatcacatcacaacgtgtcgagatcgtcagcacgtcgtacaccacgggtcgccctcgtaaagtcacggacgtaccgatacatcgttcctccccgttggggtaccttcggagcgcatgttcacctcggaatcgagccgagatgggacccttctcgaaggggtacatgatggtataaggaggtcctgcgtgcgttccaagtcgtacaggataatagtttcaagaaagtattgcatgcgtgcgatacgtcagttgtggttctgcccaggaaggatgggggagtagaggcatcgggcgtgctcacggaagaattgctccaggacgatccacattcctattcatcatcgcgcaaagtcctcgaaatcagcttccattccatggcattgcctgaccacccccgagcgtgattccctccgcggtagggtccagcagctcacctcgcaagatctcggtaaagaagaacaactgagccgccttgtccagcgcactcggtcccttgctgtaatccgcatactggagccctccgacctgggcgggctcgctcgccttggcgctctgggtcgaccctgggctcgcggctccggagagtgcggtatccttgggactgggggtcttgatcggtccggactggatacctgttggcgaggtggtaggctgggcgaatcggaagaaggaggacgtgttgagtgatcgcgaggcgaggtaaggcgaggcggcgaggaggtgagaagtggggccggccgatgaggggatgacgctggctcggaggaaagaagaagacgaggcggtggccaatcgtccgagaacgagctttctaccgatggaagccattttggacgacgatgatggtaatgcggtcgatcgaggcgaatatgtagtgtgcttgtgtgtcgtgtttctagtagccgattacgatcaaggagcgcgagatcgaggtatgagtgattctctagatgaaatgatctcgagaccttgagtgatgacgaccaggacgtttgtctacgaccgtataacctgtactcgatgtcagtgcccgtggccagttgtcgatgtcaatagttgattgccgtcgtttgggtatgtaaatgtcgacgatgctgttggctggaacccggttttcgaatcgaaacgggggccacgctaattctatcgaccagcaccgcggatagcaacatcgatcactttgacgcgtcgacgtaggggacagaaaaggattcgacctcattggtcacagggaaccatcaatctgatgaccatgggcacaacgatcaagcggaagctcgacttcccatcatgtcgatacgacagcgcctcctctgtaatcgtctttggtatcattttatttgatgctacagtgtcgtctcgtttgaaaatactatgcgaagaatgctttgctttggtacatgacaggatataaaatgcaaattgcgaagaaaagggttaaagatggtataattggcgtcgatccgtcgccaggagcttgagagcgacctgtcgctcaagatggatctctcgacgtggtcggttctagatgctaatggcagcgactagggcgaggacgatcataccggccacggtcgagccgagaggcaaagtcgaagcggcattgctgttgctccccgaaccggccgaggccgaattggtagccgagggcaagacgttggcccccgacgccgtcgtcgccgtcgtcgcctccccagccaacggtgcaaacccgatcgctgcgggttcgtatgaaaagaccgaatagacgtttttcaaaaaggtggccccgacgatccactggataggagctctcgagccgaggtcttgcgcaaacacggcgcccatgcagtactgcgagtcttggctgaacgcgcccaggttgaagtcggcctcggagatcaggtagctgaccgaaccaaagatcatcctcatgttgacggtcgtgctgcaggggtactacacaaacgtggaagccggggcagaggtcagcgacgtcgctcattttcggcaacgacaggcccggctcggcagtctcacctcgtagtacccttcgtaaccaggcacggtggcctcacgagatccgggaatggcattgtatagcgaggccacgacgtcggaaggacctccgatcaaggtcgtaccagtgtcgatggcagcgctaggggcatcaccgttgtactgagcctgcgatcgaacgtggacgtgtcagctgggtttcgaatcgacgaccatggccacgacggtcccgactcacgatgccaatcgccgtgtctccgattcggatcccaccgatagggatcctccagtaatccttctcgtcatcggcgatactgacgtacgtaatgttaccctcgtacagggtctggttgaggtatcccagtgtcatgagccccccgttctgctcgaccctggtggccgagtaatctcccctgtaacgagcgaggtagaatcccatggcaggcgtagccaaccgaccggtctgggcgaggttttgccaaaagggcgtcgcaccggacgaagccaatcgggcccaggcgagacccatcaggcccgagtacgggtaagtgaggaggttgtcagacgcttgggtcacgagggcaaaagtctgggattcgaccatatacccagccatgctagcggtatcctgggcgagggtaccgttggcggctcccgaaccatacgtgatgctaaaaggcgttccgatcctgtccattgaggaagagaaaaggagggcaagaaacggtatgagcgacgacgtccacctcgaacacgggaccggacgggcccgactcacatgttcaacgagctactcgctccttcatcaaacgagctgatcccctgacatgtctgactcgtgcactgcgaatccgtcaaccaaagatccgaactcccggtatccatgatgacctcgaactcttgcgcaggggtacccatgtacaaggtccccgtgtaactcgcatcgtacccgacgtcgatcaggtactcttcgccgacctgggatccctcttgactttgtcgggattggagatcccgcttgatgacgtccatatgcacgtcatcccgcttcaacaggtcttgcccgcgttcgtcgaggagggacgagtattttcgtctcaggttcctcgcctcgttcttcaaccatgcttgacggatctcgaggtccgggtggtgctgacgggcatggtatgcgtgattatgatttaaggggatgctcgctcggtcttcgactactgaggaagaggcccgtcctagggctggcgaagcggtagagggcgtcgaggcgagcaagagtgcggccaaaggagcgatggtggacaacatggtgatcgatgtcggttggcgtctgtctagtcctcacgaaaagttgtcgtagagtggtgttatgcgagaggcgatccgatccggacgaacaagattatgaaagtcgttggagaattatgagtcgtggtcgagaaatgctgtgtggcggattgccaagctgagcctccgtgctgcgtacgatgaacgctgcgcagtcgatttaagagagtaagtttcgaagagatgtcaatgcccgaatgacggtggacaatggagacgcttggtttatatgaccacgagcgtgccggttcgataaaaggaaggctgagtacgtcgccgttgcggggtcgacgatcgagaaaaagtgcggtcgctcgattggaacgtgaattcgaactatctgattattttgttgttgttgtcggtatcggcaacggcggatcaagtcgagtgtcggtcggactggttgtcgtggcaaaaagtagtccagggatgggtcgtcgtatataggaaactcaaagtctgtctgcaaggttcaacaaagatgtaaggtgctgttgctcgttgtggcacctccaacgaacgggcattgatgagacgatgcgcgatgatgatgccgatgatgatgatgctatgcgaagcggcgagaggagtgtgactacggagttgattgtaaattcgagacatccgaggcgacaaaatggctgcgaaagcgagagagaacggaatcagacgggaaaaaaatcacattccctctcatgttcccgctcttgttatttcggcgatcgcctttgaattcagggaaaaccgccgcccgagttgcctgttttggtggcgttctactcgccgtgatgacgtttccttgctccttcaaccgagagctcatgcgcgccacgagcgagcgagccggcttctcggcaaacgcatcgcgggaattatacgcggacgacatctggaaattcgtatcgagggctgtgctgacgactaccgatcgacactcggggattatgaatagcagcacgccagaccccgtctccgcctatgctctcataacagcagcgccctcgtccactcattcactaagcgcaatctcgcagccgttctcaagtcgacttgacctgtgcaggattgcccttgtcgtcgatcagctgagcatcgatcaatcccgcacgctcggcaccggcctcgtccttcggcctctccttctccgcataggcatctctgatcgtctcttcagtgtcaccccccgtccgttcgtccaccatctctgaatgcaccgcctctgtaatgatctggctttcctcattctccggcaagtcctccctgatcaacgaatgacccaaagccgtccccggcgaggtcgtcgctgtggcaggtgacatcggctcgtatgtggtccctcccagctcatcggcgtgcccttgcggcaaagtcgcattgtaagacgggcgcctcgtgtgcatgctcccgacatctgcgggtctccgtgggggtagaggcggaggtgcgaattctcggttcaggttgggcggcgagacggctgtaggtgaagctgcgcctgggggcaagaacgctcgagagagtccggcctgttctggcgagtcgtacgcttcgtcgttcaggttgatgcgatgcatgcccatggtgccttcggcgggagatccgatcgacgtgtcgaccttgggtaatttggctcgggtatggtgcgagccaatgccagtgtggacgggttggtaggacagactaccgcttcgagacagggctgctcccgcgggcaagaccggagcgtcactctcttcctggctgaagagctggtaatacgcggaggaagagtagcaatcagacggcgctctaacaacagtcacatctgtgcacttacgagtggagcgtagttgatcatgtcttccactaccgtgtcctgtacagatcaacggattcagattttccattgtcgaacccgtgcatcaactcgtacttaccttgccgatcttgaaattcttcagatcgccatctttgggcagatcgtcctcgccgaacagcgtcttgccgaatatcacggccaggttctaaagcgagcgcacaaattttgaggtctcggtccacgctcgcaagactcgcttgtcgcgtcttaccttggcatccatcttgttctgagtagagtgcgccgcgacttttgacaagtgctcgacgatgactcgcagcgtggactgatggataggtggcatcctagacaacctcgctcggatggccgaaaagttgctgctgatgtgcgactctgtgttcggaaacccagccgagtctgcttaatcttcgcgcttacgaccttacgagagggaccgcacatacctcggttttccgtgtatctgattcgatcagcaagagggaagtaaaagatgggttcaggtagctctcggcagtactttttcaacacggcggagacgaccgaaatctcgtgttctggtctgaagtggaaaactcgctcgtctggagcccgcttgcgggggtcagtgccgccactctcagtgatcgaggtcatagtggctcaccttgctcgatctcgtagacgagctgtaatacagcgggacgttgaggatctgtctgcaatcaccaggcaatgcgaagtttgctcacctgctgtacagccgagactctcccgttgatacgatggatcccctccatatccaaggctagattgccagaaaggaagtcattatcacagtcacgtgagcttccttgcaatgactcctacctctggcgtccagctctgcgatacacttgatgacgatccctggcggcgagccatgcgctttgtccgtccttgtatattcgtaatcattgagagagactccaaagatcaaggagcgacattgcccgacctgccaggagcgacaatttcaggagggatgtcgatatcatttgaagctcgaatcgcctcacatagtaattctcgtacaggactggcgtggcgaaattgatggtcttgagatgaggtggaccgctaaagattgcgactatgcaggttggaaacaaaggttggcaaacgcttcgccagcgtgagcctgataaatagcttaccgtcccttccgatgtccacattctcgaccgccttccgaggatgttccaccatctgtgcattcgtcgccgcagtcgctgacgagcagtcgatataggacatcagacacgccttgagcgctccgcacagctcggctgtgaaggtatcaaagctctatcagggaggacgcagacgtatatcaagatggcgactttaaacaaggaaggataaggaaacaatcacgcacgtcggatgcagacgcctggatcttgttacgtcgcaatcgtagggattcaaggtggaaaacagcctcccgataagccttgtctgtaaccagtagcaaagcaagctgcttagtccgacccgatcgtcaccagctcgagtcacatcaccgacatacctgcttcttccgcttctcgtttcaatttcactcctttcatagcactcgctttgacagcgattccatcgggcactctaccagcgccgtacgtcgtgctcggtgagcgcgcatgacctagaccctgacccataggagccgaaggcaagggctgcgttcctccctcacgacccgagggtgaacctccctgagctggggggaggacgacgaatccttcctcgggactcttgtccttatccttgtcccctccgaatctcgccatgaaggcgttcaaccctcgtttcccggtgttggcgagatctccaaagacttctttcgccttgtccgcctgacccgtcgagcctgctcgtttccttccacctgagccgtcgttatcgaacgagatggtgttcatcaacgctggattagacgaaggaggcagcggggctgaggagcctggagggctcgtgtacgggttcgaagtgtgctcgtatgagggagtacccagaggcgagtacgacctgtcggcgtgtacaggatctgagagcagtcgagcttgcagcgcaatggccgaatcttgacgcttctggtcctccacttcttgacatttcttaaagtaggcctttttcagctttggcagagtatgttccgcctgatcgatatacatctgcgaatatcatcgatagattcatcagccaatagtgtttatcgtgttttaacgctgcggacacgacctcttacattcgtcgctctctcgagatcctccttgatgcgtcccttgatccgtccttgcaccgtagccatctcttgcaagatcctgatcacgctatcctgcaaagcctcgcaatacgcccgtctcgtatcggcttcccgctccgtatggtcccgcacctctctccatgcttgtcgggatgtgggtagaggtccatcgatcccactgttacgcaagagactgataagcggccgtggaggagaagcgtcatacacacatttcgactcggatacttgctcttcgtaaagcgagtcgaaggctctggatttgatgtatagccgttgaagggagtcgacgtattgttcctcaatgtttattcgttcattgaagaatgccagatatcccttgttgactgtggcgacggcaaaaggtactacacgattagcttcgacatctcgataacccccaagctgtatacctactttcgttaagtttggcctgattcagttggaatcacgtagagtattatatccatcagctcgctatccgacgggaccttgcagagcgactcacgtcaaatttgcccactacatcgtccaccttgctcgtaactcccttgcctgtcaagtccacgcttcgtcggtctctcgcttgttgcttgtagtgggacgattcgccataaggcagcgactcgctcgacgatgcgggatgctgcattctgcacagatagtagctcttttgcagatactatcacctacactctggcttgagatagaagtcgaacttgtgctgttgatgaactgaatttctggtgggacgtggtttctactgctcgttccaaaggcttggcgaacgttcgaggtcgaggttgttgttctggtctagcttcctttatgcgtatgtggcaagatacccgcacacacagctataaccaagctcaggctcagtgatctgactgcggatggaggatcccgtggagtgaccaggtaagcatatcacaccagtgtgatctagtgatcctagtgaccgacctctgggactatcctttcccatcatacctctcccagactcttgatctctacccggatgcaaaatgggaatcatccacgctcgacgcctatcttgtaaatttgcttccgtccgtcgccgccacatctcacatggcgtgtctcggcgcgtggatggtcaatcaaccaaggctgtgccggttctcggcatcattgttggcctgacccgtccaagtcgtggtggatgagatggcaacgatcgtatagcggtacaacacggatggtatgtgggtaggaaatttcatccgcagttcaaagcacagctatatacaacagggtatcgtgattgaaaagtacagcgacgcagagagagatgggatttcgaccggcctcgaattagagggcagcgacggccgcactgatcaacagcaaagctgttccgactctgcacggcgaaaaagcaagtggatatcgatcagactttcgaccatcgtctcggtcaggatcggtatcactcactgcaacatggacctcttgaccgatcgagacccggcgttggcgggtgccgaggtttgtgcaggcgttcccgaagccgacgtggtaatcgccgcttcggcggtccaggggtacgtagaagccggtggaggtctcgaggacgtcgaatcgatactcctagtcgttcgtgtgaagaaaggtatatccgacaaagccatcgtcgtggtgataggtgccgtctcgtttcgaactacagtgatattgggtccgaagaatcgtcggccagtaggcgtcgagccgtcctcttcgagctcgatcagctggtggacgagagaatctcccggtgcaaatagataggtcgtatcgttgtaatagacaggcccatcgcttcggaaagtgatgttgcctggtgagacggcatgtccaaagtagagagtctatcgacgtgtgaggttgtcagtcgatcgtcatcctccgcatcagccaggtggacacgcacttcgctgaactgatatcccgagggcgaggggtaaacgctctccgagtccggtcggttgaagtagatcgtgtacaggaaatcccaccgcaagcgactgtcgggttggaggtctgcctggtctccggtggtgttgaaggacaattcgatggtcccgttgggcaccgcgatgttgacccggggtagctcgggtaagagcccgtaataagcccccgggatattattgctagtatagttgtactgtaattgcgtgcgagacatgttatactgaagccggtcggtatgatcttgtgggtcgattagataggagaggatcgtaccgcccgccgccccaaacgacccaggtttggtagccttatatggtcccaaaagcggtctcgcgacatatcggcaactgccgcatgtaggaactgccaagactgaaccccggcatgacgaaattgaccgaggaagacaaggacgttcctgttccatgacgatatggccgcaaccctcacctgatcgaaacggtgccgaacgacatggttcgctaaggccttagacgaggaagcgcggacgatttgaaagctttgagacacgggaataccgtgcctgggtgttgcgcacgcggtgcaacagttcaagcgcgactagaccccgaagccgatccccgaccgaatgctgagctatgagcacgatccatttgaaaatggatttggcagaagtctttatgtctttgcttttccaaaagacatagccaagatttgttgttacagcgccagaatgaggtgcacaaggctctcaaatcagggcaattcgagctgtaacctgttcggagactgccaggctgttgtctgtggatgctggcaccacaaatgtctctgcatatgctaggagcatgcgccggtcgaacatcagccacaagagcaagcctgaacacggggtttagacccgccgatgccactgctcgatgcccgttgagttctcgttcccggctctcagtttgccttcgatgattcgtgggagaacggcacctttcttcgaccggagttgtgaacttgtcctgtctgaaagttccggcggctttcccgatgtccgggcaaggccaaaataggcatgctttgctggtgtcagcgttgtgataaacctgaacctgtgctggttcccctagaccgaaaagggggaaagcgaaactcatgtagctaccggaatgtactcgtatggacgcggcgctatctacccatcaggttcaaggcgaatagatcattcatatccggatcaccgaacatgacgccgaagacccactacatcggaacgcaaccattcgcacaaataagcgcggagagcgaagacgacgctgcacgatcgttcctcgactgtcagaaagctgtttggtccccaagctagaccgtccccgcatgctctggaagcggatcgttgcgcgtcaagtcgcagtccacgctcattaattctatacgattttgcataactagcacactagcctttccccgtcttcactcttctcgaggggtttgagaaagcagagttcagacacatctatcggcggcaaaaaccaacccggaatagagccgtgtttgaatgtctctgacaacctcgtacgccctctccggcttgtctttttttcttgttcacgtgcagcgactctcacaaccgtcctctatgatgaaaactctcgacacgacggagcgagtttactctgcggtatgggatatcatacatgatcagcatggggcgcgacgatcggcattccgtttgggcgcagcgtccgctcgagatgactcacgggcataagagctggtagtggtggtgtaaccaggggtggtgctggcggtagggtagctacgcttgttcgagtggatcgagaggaaagcctttcggacaaagttgtggtagaggacctcggcaccctgatagatcaaggtcacggatacgagcgatcagccttctgcgtatgcggatggcctcacaaagagcgagacgggcttactcggaaagaggggctcatgagccagaggatgaaggtagtcttggtgacaaagtagtaggctagcatcatggcatcacagtcgaacgatcagcccgttgctttctcgctttatccacgggcacggcctgctcacggaagtagtaaaggataggcctgagggcggcggattcgacaaagttgaagagaccgaagacgacctaaacatctcggctgatcagctttcctcattcatcttggtgtcacggaaaaccgccgttccgcatccccggggaatccgagctcacccagtaagtcaaccattgcttgtcgtcgttcttatccgcagactccaaagcctggacgctcaagtaagcggggatggcccatccgatcaagttggacaagggcgaggccaagccgaacaggttgaaaaagatcaaaaagatgaaagcgcctccgagcccgaggacaccgtagaccttggggaccttggtctgggcttcagccttgttgaggatggggtattgggcgagctaaatggacacgcaaggtgggggtaaagatggtcagtgtgggggacactaggtggaagggagacttcgggacgtcggcggccgactcacgtgcttgtccaacctgttggtgtactggttggcgatggcggcaccctgctggacgtaagggtggctcaagacctggttggcagtctggttggcacgggccttgacttcggcggattgaggttgagcggacatggttgttcgagttttttcgtaggctatgcgatccgggtcaagtcgatatcgttggtcgaggtcggttggcaagacgaagatcgcaatcgacgtggataggatatataatacgtccggagaaaggtgagggatgaaaggagaggaggaggataaagaatcccgtcagtcacactttaaatgccttatcgcgcaatcgtcttgtcgtgtgacgtcgacgatttcttgggctgtgcaatttcgctggacggtactcacagatggtttggtgtgatgaagcgattcaaggtggtttgagctatacttcagagaaagtcagacaggtgaagacgtgaatttgttgatagcttgtatgatagaagtaaaccgttgctgtctgcgtggaagggtcgaggtcgaggatgaggatgagcgacgacggttgagaaggaaaacccgagcgagcgatggagaacgatgacgcgggttcggtttcgccctctgaagagaggatgcaagcaagcgatgatgcaactttcccacgcgcgcgctaccgaacctattccatcctgttaccacacagcgcgccttctccagtcgccagtcgcaagatcgcaagggaaatgtttcaacttttttacttgacgaaatcgactgtgcccgcacttgaatcagcataaaagatagcaaacagtatgaagagctccttccatctgtgtgccggcggccgatagacagcgttccagagagtcggtggacttgacgggctagtatgtgcttacatacagagctacaaggggtttcatggtagtcatctatctatgtgtcgtaaactagggagaaaacctgaagacacgtctccgatccacatagcaaacagtctcaacgtctcgtatatatccggcaaaaccaaatctagcctattctatccttatccatatcctgtctcgaaaccgggtcctatcgtaagcaacatcgtgtatctatcgttgaagcgggcgagaagtcaaaacccatcttatcctccgagtcgtcgtcctagacgtcttccgccgcatccccagtgacgctctggatcctcagctcgaacgggtcgggcagcccgcgcgtatcaaccctgagcaccctcaagccattggcgtctccacgcacgtcctccacatcgagcaccctctctacaccgccggtctgaccggtctgatgatggatgatacgcaaagtctcgctgaggtccgtcaacaaggtcaccctccccatttgcccgctgacgagcttcatatacccgggctcgaggatccgacgggttcgggtctgggtgatcactttgtataccggttcgcggacgggtggtggagccggggtggacgttccaggcagctcagtccgaggttgtggatcgggcacgaggccgagagcagtcgagtctaagttgtcgaaagattcgagagtaccttcaggctgaacagtgacagaaggaatggtctcttcccgttcttctttcaccggttcttgcttccggtcctgcggccgaacacagagtttgctattgctataagctcttgaccattagtatctcgcatcaagcacaccgactcaccttgtccaacaagggcgtctgctcgtgcgcctcttggtcttctacgatcctcgctccaccaccagtaccttccccctgctcgcccttgctgaacttggctaccatccatctgaagaagccacccaatgtacgcatccacaagccacggagcatgatcgcgatccatcggaacgtccggaatacgggattgacgctccgctcggctccgtgaagggcgacaggagggtcccgatccgtctcactgagaccgtctttcgagacggtcgaagtctcgctttcggcgtcatcggtatcagtttccgacctcgaaccttccctcatgacatcgttcttgttcaaacctgcctcgattccagacacttctcgatcgtcctcggcatcttcatcctcgacctcgtgtaggtcgaccgttctcgggctcatcatcccttcttccccggtggtatccttgacgacctcggtccccgtttcagagaccgacatggacctggtcccagtggaagaaccgaccgtcgcccaagtcgactcgtcacgagagatggtcaagccagaattcagcgcatggtcgtcatgggcgtattccttgtggtcggtttgatgctcaaaagcggggacgaggacgacctcttcaaagtcctcctccacttccttctctgtcggtgacacccagtacatggaccgaagagccgatccgacataccccaagacgttcgtgccgtcgaaatcacgcatgaccacgcggtccagctgagcgagaacgctcctcccgggtcctttctgaagcaactcgagcgagactcggatttcggctccaacttggtctttgggtaaaaagatggaactcgccgtctcctggttccagagcgccattccacttgcttctgtgccggggaacgcgacctcgacggtatgtacctgatcttcccgttcggacggactttgactgaagacaaagaccctgccattccccttcgagacgtctctcttgataggctggcaaatggcgaggatacgttggcccgttaaggtgggtctagctttgagcggtaaagtcgagcccgaactccggaccggaccggatcgatgaggcaggaccacgtcgtaaccgaatccctcctcctccttatcttgcaacctgaaccccgaggcaggatctctgggcagtaacacgacctgctcttcctcctcctccttctgctgatcgagctgaatcgtctctgtagcattcggggagaacgcgtagaaaccgagctcgccctcactctccccgggagtgcgtctccagagatgggcgatcgcgtacgtggtacctcggtgcgagtcatccgtcgagggagaagggaagagccagttggggtgttggtcggcgtccctgtttatcggtcgacgtcaacccggatcgagaggtacggcggattggcgaaagggataggaaggcaggcgagcgtccatctcggtatcagcctcggccctgtacgcccatcccgtatgtaccgagacttacccatctcccgccaactcaagaccccacccggtccagccttgccacatccgagttccgaaatccagatcttgttctcccggttcgtccagcgttccatgtttgcctgagcccagtccgaaactgaccgtcccgttggctcctaccccgcccaaccaccagatcccaccatcggggtaagtgatccggaatgtatactcgaatgaccctgtgagtgagatttcggattagatcggtcagtattcttcatcactggtaacgctgggagtatcggcgatagactcacgggtaggggaagaagagggtagcgggagagagatcttggccatcaacctccgggaagggtctgacttgagattcgcagacgatccgggagaggagatattcgtagcctggatcgtaaacttgtcgagcttctctctttgctgggccgggttctctgcctcgaattcttgatcctgatcttggtttgcagtcccttcgggcaggcctccgacccaatcgaaagggatggccctccacccgatctctctgcccgtcttgtcgggcgcgtcagtccaaacctcgaccttgtctcccggttgaagcttcttgtcgaggtcttgagctttgaattgtatgtcgatggatttgatccatgaagcgggcgagttggatgccggggtgataggaagggggatgacgaggtgtgccccgatgggcgggttgaatactaccattgccggctcgtagcgctcttgctatctcgacaccactgcaagcggcggaactgagacgacactgagagttgtgaaaggtccgtatagacgaccagcgatgttgtagtagtccgatgagatgtcgatgaccatcccgtcgacaatcagttcaaaggcaactcatctctcatgaacaagagtcgaaagcgcgggaatcaccgagttgacatcatcccagcccaacccaaaagcgagttcggaagcaaatatcggatcaatctcacgctctcacccgggacgacacctcggaaggcctctcaccaaagtcatgtgaaacaccgatctcgtccatgccgtcattgctactagcgttggttcccccaccgctcccagtcttccccgccgtgatcaatccggccacacttggcactcggtgtgacgtgccacgaggagtcgctttccgcggtggactagctcgaatcagcttccgactcgaaggcgaacgcggagcagaaggaacgctgcgggatcagatccgtgacgtcaaggaactaaatgagatcgccatctccccagccctcccctcccctttttttttaatgatacggcgaccaccgagatctacaccgtctaattcgtcggcagcgtcagatgtgcataagagacaggcccatgctcatcacagcggacgaagagctcaaggcgtacttggataccatcttgaaacaagtacacggtacgtccactgcgctgggtgttctcgtccaggtccccggcatatcgcactcgacaccggtttggctgacgagaaatgtcttttctcgatcagaatggttgatgcaaaagacgatcacgaggctcgtactggcgatcacttcaaaggagacactggagactgtcgagcgatggcagtttgatatcatcgccgaggacgagaacggaagtggggagacgagcgggaacggtatgtccacgccagggtcgggtcgtccccggtagctcgagagacacgaatgtcagggtctgacagccaagagctgggcttggttttacgtatcgcgctacagctacagcctcgggcaagcccaaagaaaagacggagaaggaggttcaggtcgagatcagggagatcatgaagcagatcacggcgagcgtgacattcctgcccgtgctcgaggaagaatgtgagtaggaatccttacacgggagacctcagccggctcagctgtcaaatgacctactcatgtgtttcgtcacgatccactttctaggctcgttcaccctgctggcttacacgtcaactcaggatcccttgcccttgcctgaaaagtggaacgatgcggaccctcacttgatcgacaagggcaaggtggagcaagtcaggttgaggagtttcagcaccaatgttcacaagatggaggtgagtgctggatgtgactttcaagaaggagaagcccgggatcaagaacgtctgctcatcgagcgcaaacttcgttacaggccatggtcgcgtaccgagtcggcgaataattgggtatgggacatcacgccacgacgtcagctggatccttctaccgcatacgagagcacgaacatgtctgtaactgtatagatgtaattataccttgaccctacacggacccattcgatctccgtctgtagtcacgtgaaaatagcttcgagtaacgctaaggcctaacgcgagtcggggagtgagttcgtcgggaataccgttaaaggtcaatgcaccttctatccgtcgggataaagcagatacagatcataggcaacagctccagattgcaccgagttcttctgaagtaaaaagcaagatggactctcataaccagggcgatcaatcggcgacagtcgaagaagtcgacgtcgacatcggcttcacggtaagcggccgaacacaactttggactcgtcatccgtgacgtcgagactgatctccgacttgttctggtctgcatcaccgctcagcccaggacggaggaaccccgtttgaacgcaccaatggcgagcaatatcttcagagatgctagagaacccgtcttcaggcgaggtaggtctcggacgaatgaacaacccggaggtacggacctgactgaaggagtgtgtttcggttcgaacagaaacccaaggggaagaggtccgacagtggcaggaggaagagtttcagcgcaaattacgaggggaatatgaagagatgcagcggagattgaacgaggtcgtatgttgtcccactcttgctctggtccagaagcgaatgcgatttctcatctccaccgccgtcggtaacaggtcgaaacgtcaatggaccaccctctccatatctcctccatccggatccccaacccaccccgtatcactcgatcgggatttctcgacgcgctcaccagccctttcatctcgagacccagcacctcttctctctccattccttggctgaatccagcgacgagcagcggagctccgaacccgcctcagacgctgcatgagatcctcttgacgacgaaagccatggcggctcatctccgagctttggacattttccacgatgatatcgatgtcaagtttcaacccgccgaggggggagcggtcggggatgtggatctcgtcctggcggtgagagaaaaggggaggttgttcttgaagggaggaaccgaaattggaggcggtgaaggaggagctgtgggttttgcagcaaggcgatcctcgcggccgatgatagcatctgctgatgacccgtgatcgtttcaattgagtagaatgctacggctcgattgagaaacgtattcgggggtgccgagacggtcgaattcaacgcgacctatggtacgaagaccaagtctgcttaccaggtgtgtacagccggaccgattcgatctggaaggcgccaagggaatgctaaactcgttcaagtaaatctcgtactccgatctagctcatgttttcgactcccttgctggcgtcgcctctcttgaacctgtccttgtcggcattctcgctcgatcgggacaatacggcttttgccgcccatagggaacgatcagaaggagcacgggctcggatcagtgtgagtattgagactgatcgagggctgtttcgtttgtaacgacattgacgttgtttggtgatcgcaggcaagagctccatggggaacccacgacttgatgtacgagtatattaaccgggagattggcaacctgacccccaaggcgtccatctcgtgagctcaggaaatggttcagccaaggccgtctcaactgaccctgtctatgctgtcctccttcgtagtattcgggaacttgcctacccatcgaccaaggccagcctcgttcacacatatacccgggatactcgtgatgatgcttggacagggtcaagggggtctcttgtcaaagtctcacatgtaagtttcctttttctgtttgcgagtcacagggctcgtttaggacaacggcttatacccttccattcgtctacaggaacttgcaggtctgccaggcagttctccttcggcaaactttttcaagagtaccgcccaaacgcaactttcgaggatgatctggccagggtcaggatgggtgaggttttgtcacccatgtcctccgcttgcataccgtagatcgctaacattgataaacatcgatctgctctagcactactccattgcctccctcttgaccatttccgtaccgctctccccttcaggaaagactgctttgcctgatagggtcttcctcggcggccccaacagcgtgaggggttggaggatcggtggcatgggtcttcgtgacggccgtgagtagcccgcacccggtatctggtcggaatcgtttacgagatctgacaatggggtatttgcagacgattctttgggtggagatctggcgttcgcaacgggactctcggtatacgcaccgttccctgtcaaacctgaatggccagtcaagctgcatgggttcttgaacaccggccgagtcaccgcatgggattgccgtgagtgatcccgtcacaccgatcggtgcaacgattcgccgactgattcattcataaaacctgcagaacgaacatttgcgaacaacgtcaacaagttgttctcgtcgccgaacttgagtgcagggttcgggttgctctacaggcttgacccaatcaggattgaggtcaatctcgctctcccgctcgttggacggaagggcgaagggtgggcaagaggtctaggtgtaggaatcgggctcgagttcttgtagatgtagcttcatgcattgtgccgattctgtgcacagcctgagaacgtcctttgtctagcattaccgagcaatacatgcatccgaacgtgattctgaaacgccctgggcagccagctacgctatgcactctacctgtggccagcctccaggtcatcactttgttcaccgcctctgctaccgtggcacttcacgacagctcgcgactccttgtcaggatggctctggatgccctgaatgagatggtagaaagggtggctgtagagagggaactcggctgttaattgtacggcaaatccttgtagtcccatcgcggcatcttatgcagttcaagggttttacatttcgtcatttgtaccttgtcacctcgattgatgttggtaagatttcgcttccgtctcaatcaagggtgcatgttcagacatgttccatcacatagtttgtctccaaatttgatccagactagtactatgttggtcttctttgttccaccactgactcattacaaattgtacggtacacacagtccgtacaccacgtgacgcctgcttgtacgcctaaacaaaaccagctcctccacaggaccgcgatactcggaaagagtcacaacacagaacttgatcaccttgaaggactaggtgaggttcgctttgtgccagtcgcctctgcacagctgcatacactgaacccacgaacagtgctggggtcgcaccgcaatcaggctttgagggtataatcgttcttgcagctagtactccttctcgatcacactgccccttatctgcctgatccatgcgataccgtatggagcaagcagatcgatgccaaagagcgttgcatgaccgattagattgtcgtcatgatgatttggtgtttgatacaaagccgatcaggcttgccgaaaatcccgtcgtttcctctcccgtctgctccttcgatcgcattcctcctcctcgcgatcaagtcttcaccctgcaccatgcctttgctgtcgctcctcgtttgcattgatgggtgagcttagaatccgggtacaaggattccgccaaagttcctgacggcgaggactccgagagcgaaggtggtaactccgatagcgatgctatatcaacatcagggtagagtatcagctccagatctctggaataaatccttatcaactacacgggttgcgtgcagacatacttgatgttgccagctcgatattcagggttcacaacctggtcgttccagaaccaggtcaaggggttggaagcgccagcgccgatggcgagaggctgttgaggtgctcgtccagacatgttagagggaattgtgatgagatttgctgcagaacgacggctatggcatgcggaggacgttctcgaaattcacctatatctatttgaaagtagttgatcgctcgaggtcgaaaagaaggcgaggcgcgtcgagtctatggtcactttatctgtatgacgacgacttctctttcacttagctttacctacatatgatgcattggtgttccgagttcttgaaatagggtcgtcataaagtggctaattgaattacaatggaatctatacatatgtaaggctgccagagaagcgaatgcgaaataacaccgccatgcctgtgagcctaagccaagaccttgtcaaaggattctcgaccgacacttccacctcgcatagagttggtcacgttcctagcgaagagatcgcggtttcttcggagatcctcagcggcatctatcgaggtaagggcttgttatcagcgtgaattcgatttgtggctcgaagaggggtgggatttgcaacagcctgatgcaaacctttgttcaacgggtcgtcagggttgctgcaaagacaagatgatttcagacaatgggttatgacggtccaaactttctggacttacggttcgagaaacaagtactgtaatcccacaagcacagcgttcaagctcaagacctgtttcgcaacgagcgggtaaccccttcagacgccggtctccagaacggcgtgcaactagccttatccaaacttactggcttccagtcctctcgcagaatgtttagacaaacgttaccctctagatcgaggttgggatggtagatctatccgattaacggaaatagtagagattagattcgctcttctttatcctcaacaggctgcacaccaccacgcaacccgacatgaactgaccttctgagtgcatttgacttttggtgcttcgtgaggatagttgggggaaatgttgacggtaaagttgaaagacccgcccttgtagaaacctatatccgggtgaccgggacgatgcgaagatgtcacacgatcattcaagcgagtcttcagctacgacaagcactcaccttcgtcagggttaaggatgatcttgaagctcaaaaggtttgcagggtcagggaaatcggtcttcatggtgggaggaaggtcgagttcggtcaagtctgattcctcgggcaagaaaaacgaggcagagtcaggaggttgcggacgttcattcccgtcctggggatgactcacccttctgcactcgaacctgggcggcagaagtcttaggcttctttttcgctgccgcttgttcatccttcttgacagtccagatctgttgtgaggagtgagccgagtcgtcgatcagggtcctttcatttggatggctgaaaagtcataggagtcaccttgatcatgttgatacgtcttgcggtagctctttggaaattggccaagctgctgctagtagggggcgtagactactgcggactgaggtatggcttgttttacgttgatggcactcttcagggtcagccttatagctctgtgatctttcatatttatatcccgggatatgagagaatgtcatatatcagtatgagatgaccctccagaaggtcgtgaggcgaatcgacgcaatcgagattcggaacttaatttgcatccgaacaggtcaggaccgacccttcgagatggtaataagttggtcgtcatggtttgactttatacacaaaccggaaagaaccactatgaatgagcaagatatgagtcagccaaactctcctggtttacagaatgaagcggtaaattgtctcaatggaggtcgacgatctagagtccagaccggtgcctgggccgcggccgattcagcagctcagccaggacgtcgtaaatcagattgcagctgcagaggtaaatcgtcactacaggtcggtcagtcaagagctcaattgaccccgacctcggaccctcttcgcagattattcacagaccatctaatgctattaaggagctgctggagaattcgctcgatgcgggtagcacgagtatcaaggtcacgaccaaggacggcggtctaaagagcatgatgatcaccgataacgggcacggaatcagagtaggttctggctattaacggtctgagaagaagtctgtagatgcggcactgaatcaaagccttacttaaatctgtcagaaagaggacctcccgctgctgtgtcaaagattcgctacttcaaaattacgggcattttccgacttacaatcgctcaacacttatggattccgaggagaggcgctcgcgagcatcagtttcgtcagccgagtgagtgtgattaccaagacggctcaagagcccaatggttggaagtatgtaccgtatgtatcacttcgagcgatgtcgcaagctgatcaaattctcgttttctattgtcatttcagagcgcattacagtcaaggcaagctcgtcgcacccagcgggtcaagttccgcggaaccaagaccttctgctgccaatcaagggactatcattaccgtcagtgattactgccagtatgttggagccgacacaagttgacaacatgtcttttatgcaggcggaggatctcttttatgacgttcccttgagaaggaagagctttaaatccgggacggacgagtataacaggataatcgatgtcgtgacgagatacgcagtgcataaccctcatgtcgcctgggtttgcaaaaaggtgagataactgcaagaactaagctactaccataatatgttgattgggaatattctggtgtgaggatagcatggtaccaatcagcccgaggtctcgactgcgtcagggtcgacttgcctcagcaacatcggtctcttgtatgggtcggcgttgtctcgagagctcctaccttttggtcctgccaagaatccaaaggtcggcatcgtcaaggttcacgggtacgcgagtggagcgggatataacggcaaaaagggaatactgctacttttcatcaacagtaggtctctgcgtgttttcaggactggtagccgcaaagcttgaaacacttgtgcgttgctcgcagaccggctagtcgaatcgaacaaatttcgaaaagcgatcgaagctatgtatacggcgtttctgccaaagggctcattccctttcgtatatcttaggcgagtccgcggttcaagaacctgatcagtaagcaagctgattcatgttattttgggcgagcagtctggacatcgagccacaccgagtcgatgtgaatgttcaccccacaaagtcagaggtaagcccgagcctgtgtggcaatgaaagtactgcacggacgtcaaagctcacggatcaatatataggtccattttctcgacgaggatgcggttgtcgaactagtcatggacgagatctcaaaggccttggcgaacgctaatgcatcgagaagcttcagtattcaagtaagagcagcaatctttcggttttgaacatccagcggctgaacggtctctcattcagacaatactgcctggcgcgtctgagccgaacgtcaagccagtcgagcgtgaatcacgtaagactatatccgctctgccacgaaatcctggaatgatactgaattccaaacatctctagtacctcgactaggagtcaagccagctgcaccacagcacaaggtccgcatagaccccttggacagaaagctggaatcaatgtcccaattcgccaaacgcaatccaaacgaactgaactctacccaaacaaaaagacgcaagctggaagacggcatgtttagccaaggtctcaccctaaccgctcaagccggtgcaatttcgcgcgaagtggaacttgttgacgtggacaatgaggatgaagaagacgacgtgggcctccacgcgcacatcgtcgagaccacgacaagcctgaagagtatcaagaagctaagacaactggttgaaaagcagtcagatcctagtaagatgactcgccgagctgcgagccttggaaaatctccggctgactcgcgcttttacgcattgcaggggttgatgctatttttgtcaagcataaatacgtcggaccgacagacatcaccgcccaggcactgatacaatgtgattctaaactatacatggtacactatggatattttgcgtaaggccttcgatcgcacatcagtccgacatggagcttatcttgctgtacggtgacgacggtatctagtcgggagcttttctaccagctcggtctgcgtcaatttggtgcttacggatgcgagatactcgagccccctctgagcatacgcgaactattaaagatcgcggtagacgccgaggaaggattgctggaagcagggtgttcgcctgacaagatcgttgaggtgaggggcaaggctacgaagcgaaagacttttagtctaatgcgtaccaatatttttctgcctcagtcaaccgtgactctgttgatggaccgacgagaaatgctggaggaatacttttctcttagaatcgacgacgagtgtcgtctggtctctttgccaacacttctgcccggttacagcccacccattgaacatttgccgttcttcatgctatgtcttggccaaagggcatgtcccaatcgctttgcttggtctggtcgcccaatgagctgattctcctttatgatgcaggtcgagtggacagcagaacaagcatgcttcgatacttttctacgcgaactcgcgcgattttacgcgccatcagctcttcacgacgtacaacccgctctcaatcacgatgacactgatatgccctgcgatgacccggcttcagcgcaacagcaacgagatgacgacgcctacgatttttcgaggcatcaactggagcacgttctcttcccggctatgcgacgatacgccaaatttccgaaagactccatcaagcacattactgaattagccgatctcaaggcactgtatcgaaccttcgagcgttgctaacgagctgatcattagaaccggatgtgcagcaaagcttgatgttaacttgattgtaatataaagtcacattgtcgagattacgaagaaaacaagcgtaaacggtccaagctggcaacgagagctgagaggtatatatgatgacggagaggcggataggaatacattccgtagatagacggatagccacgcagaatgaaactagtcttccccgctcgcgaaggtgatagcacctgagcaagacggccagagatcagatctgacgaatttcaggcttgtgccgtgtgtactggaaactcactctcgctcaatccgctcctgctctgctttctgggaaagcctagcatgctctgcaaggcggccctagcgggattaccgtgtccagactggttcatggcgtcggaagcctggctgaagctcaaactggccttgagcgcgggattgttattgggcaaggtgggcgcgagtgacaaggtcgaaaaggatgaagggaacaatggatgcccaggacctctttcgagtccgcctggaaggaggccagagtaggagggacgatggacctgagcggggctcggaagcgatggcgacgtgctgatctgtacgccgacaaaagacttggcgcggaccttgggtttgacatcggtcagcgatcctggaaggtcggtctggcgggccggcgccggggggctcgtcttgccaaacggatcgtgaagttcaccgcgtccacccgcgatctgggccggagtcagggtgggtttggaagcgggttcattcgaggacgattcttcttcctcaacgacgtccatcaatgcgggcgcgatgccgggcagtggactgtgcccatcatgtgaggcgttttcctccgcaatcttggtcgatggcccgtcgttcatctcaatgtcctctggttcagccgcggtcaatccctcgacccagacatggccgaacccaaagtgatcgtccggatgagccgagaggatggggcttcccgccgtggtgctcgcgtcaaacacgtcgctaagcgcggccgtggtcaaattcaactcttgttcgccggcgttgaggagatcgccgtcgcacccgagacaggttccgattctctcccaaagcgcctcactcctggctctgacggctcgacgggcctgcttgatccattcgtagtcgtcgctctcgaggcgcgagaggcgcaaatgttgctgaaactcctcccacgtccagtcttccggatcgaccgcgcgccacgaatcgggacgtgtggcgaccgctttagaatccttggggaacgtgggccggatgatctcaaacagctcgtgctgtgatcgttcacattcgagcgtcagccgtgtgcctattgtaatgcaaggaagagctacgaaacccgactcacgttgctaggctgttcgaccaactcggccacctcgctcggtcggtcgacatagggcagcaagacgtcctcgttcatctcgacgtactctactggctcaagctccaggtcgggttgttgctgttgctgaccatctagcgtctttgaaacgatgctcgtctcgctctcgcgtctgccaaacgaagtccccctcgccagactgctgctcctgctcaaccctgctcgacggggcagcgagtgctcgttctgggacgatgccaggacggggcttctcaatccctcgacgagcatcatgacttgttccggtgaaaggttcttttccccctcgtggatgttgcctggctgatgatgatggtgcgtctggtcgaacaagaagctggtccgggtgacaggagtcgaattcatggtcgtgtcgatatgatcttgaccgttgtgcgagccaggattgccaccgaaatcggccggcccaggggatcgagcgaacgggttggatgacgagggcgcgaggagggaagataagttggctggacccgagacgctgctactgagcgaggccggagtaaaggcgaatggggagagattgctacctgatttggtcctcctgcggcgaaacaagacacccaaatatcagcacggccgtctagtcatcctcgcaatatcacgcccgggacaatctcctcacctcctgccccccggagtcgaagctccactcgccgtcccatcttccaccgccttgcctccctgctgcgcgaccaagttcctacccttgctaggcgctctgaccagggtcaatttactcatcccgcctcctctatctccatgcacatggcccatcccggcctgaggagatccgggtccgggggaatacccacccgcgccacctcccatgacggattcgaaatgatgcatcatacctccgttcccctgaccggcgacgatggattctctcctcgagagactacgggtgacgctaggcgttcgagggcgagagtcgttacctccaccgcctgtgttcccatagtgacccccgtggggttggtaagaaaagctctcgagctcaagcggaccgcctgggctggaaggtccgtgctggttgttcttgttcaggttgtacgtcgagagcgggggcatcctatgtccgccattcgagtgagagttgtgggtcgtgattcctagtcctccacctccgccgttgactccagagaacgaggtcgaaggggacgaaccgacgctagagatggagttgtatgacgggtggcgggagtgttgacgggatttactcgtcggggggatattgagcggttggagcggggaaaaggattgaagtggggagagggcgttcagggtgtgatgcctcggggctgtagacgtatgtgcaggtgcatggagatgatcgatcgtgacatacagaggatattgtgatggacggtcagtcagtcttgccaggcgtacatttggaccccgcagacgaatgtgagaccgagacctaccttgcaacccacccccgctgctccctgccgagccgttccgtccgtgtccgtaatcttcaggcatcgtccacgtctattgactgatgctattgactatacgcgatgatcgatctggtgttcgtgtcctatctgcagagctcgatctctctcttttcctgtgagggcagcgctatgcggatcgtggagtatatatccgtgtccttgagtatcgagacgagtccaagttgatacccaaagggatgctcgaggtaagtgcgtgctgctgtgcgggcgctcaaaccgggatgaaagggcgggatgaaggtggaatatggagcgaaaggatgcctttttgaatggggatctctttgatcttcgagcttgcttgatcacttcgacgacggccgttgttatatccgaggcgggtcgtcgtgtgtcctctgtttgcacagctctcgtgtgcgtgtgaggtccgtcaatgtccttttcccgacgatggatctcggtctcgtgatcgagcgagtctgaccagctgatcgatgtggatgacgacgtggatggtgccagatgatgatgatgatgattgttgaaagcctgggtatactctttttttcctctcttgctcaggtcagcgcgtttgcacgaaacacgacgacgtcggtggatcaaagttcggttcgcaactcgaggttcactttgggggtggatcgaataagaatccccgaataggtcggactttgctagaaacgagggcgactcggggctcgacgtgcggcagtcgtgatgtggtcagaacgtactgtagtacggggtccagctggatattcacacctgggggatgtactcgtagcatatacctcatccgtaccctataccctctacgttcataccgtatggtccgtcagctcctcccaagctctccccctctctcgttctctaccttcggtcctgcccgagcgtcatcgtcctccaacattatcatgcatcatcatcatcatcatcatcatcgcggtgctccagccaggagcgaggaggaatgcgggggaacacgcaagaacacgcgagcacgccaaccagacttggccctgaccctggcttggctcttggtctcttgctcctttctcacacggaacccacggacacacgctttcactagcaaaaagggtgacgagaatgacgtttcccccgcatctgaacctcgcctgccctgaatggatgcatcggggatcatacgagcgacgtcgtgcgcgcgggacgcagcgggatcccgccggtaaatcgctcgcggttccctctgtcttgccagaatgtctgaattgcgcctcgcctcgaacagacaagagctgcgggtcatgtcgagacatgcaaggcccatactcgacagctggtaccgtagtccttggacgagatggttcgaatgcgggttcgtcttccggcgttggaccgtcgcaccctgggtttgacgccaagggcgacgtcgatcgactctgagtgacaagcgcagcgcagagggcacgaccgagcccttttctatcccatcacacgagccgtcgacgacgacaagtccaagagtgcttccctgatcacaggtcatccacgacgtccaacacgcaggacccggagcttaccctcggatgggcctcttcacagggacgtaatccgtgcaagatcatctcatctcgaagccgtctcaccccatgagtagaatccgaggcgaggcgctgacctgacctgagcccgtttagcacgactcgagcgagacgaatagatagggatcgtcggattgtcggaaaaaattgtataggctcgtaagcaaagcagctgggatccgccgggccatgaactttaccacagcgcaatagccctcggagaaccagtgtagagtcctttgacggcgcgttgccctcctgcagaggacttccacgtgattgtgctgttcgtgcaacgtcccgctcgtgttgaagcatcccgttcatcttggaatataataacctttgggatgaggaatcgtaagcgccacttggcagagatagacagaatataataaccgttgaatagaggggttataagcgaagtagcctggatgaagcatggtgatgacgactaattgatggtcaaatatggagaccttccccgagtattgtagccatcttgtttgttcgatttgctgctcatcgtcgaattgccattcatcgtcatcattgagtattccctggtttgtttcaagcgcagtggatgccaggtaactcatggacaagatcacctttggtttgatgatcttcaacagcttgtagagccacatgcaagccgcaaaaaggttggtctgagcagtggtgacattccaaagatctgcaaaaggctggatcttgctgatcttgctgccgtgctcacccagaagatttctggcgcaagagcggctggtttcgacgcagtcttgaattcgactttagataagtagggtaggcaacggatatcccgtggcgccaagtttgaaaagtctgggcgggatatcaagtggcttgtacagtattacccggtaatacagagtaaatgagcactcgtgagccgagaggcgaaatggactggcggggcaaccgggttcgtcaatcgtctctcggtcatgaagacgacttcgagtctgacaacgtcaatatccgatcaagtgagagacgaggtcgtcgagctcccccgagtcggagctttgagacgtgacggaatcgcgtctccgaggaacgaggtcatcgtgggtctcatgcttgttccccgggtatgttcatctcgtcatgaagcggaatctctctggttgaccaatcgtacaagggtgtgaggggaaattcgagcggattgcgatgatgatgtcgtagtcccgggacgcatccgaacgatcggcgagggatgacgggcatggaaactggtcctcgacgcgcatggatgatctgaaacgctcctcccccccgctttcagagggtcgttgggggaaacccgacggaacgccgatgatcgattacgattcgctcgctcggaacgggggggtcgcgagccaagctgatgctgatgttttggttgagacgacggcttttgattggttcggcatctgtaccgcaccgaccgggggatctgggcgatggtggtggtgttgggtgatctctgtccaatcacaatgtcgctgctcgaacccggctgtctaccgccgagattgatccgatcatgtcgcccaccccccccgcgtggcactcactcgcccgggatgaatcgattggagcggatgtagaaatactaccgaaacagcatgaatcggttgataagggaaaacgaggtcaccaccaaccccccgcgacgagctcgttcgggaagtttgagcggggaggtgcacacacaccacctaccccaacaacaaggcagggaggaggacgaggagtgggcggggtcgtaaatgaaatagatgccgagccgagcctgcgttgggattgggtcgagcgcagacagcaaaccgggcaagagcggggcggcgagtcgggggaagagacgtcgggaaaggaaagagtcgatcccttatctttcgggttcaacgacgagagggggatggatgacccgacgtggtgcgggttgcgagctgacggacgacgaccgtaccgcactgcactactactatataatacggaccacatcgatcatgaccgccccgaggtagacatccgctcgttcctcttgtgctctccaacttcgcatcttcgcaactacttacgaccatacccccccaccacaaacgaccacgaccaccacccctactactcttatcaacatcatgtcccacctcgcccccgagcccgaattcgagcaggccttgcacgaggtcgctgctactctcgtacgtcccccactcgcgcctctctcgagccttgcgacaccccccatcctaaccctttccccccatcgtgtcccgcaggaacctttcctcgccaagaaccccgagtaccgacgagccctcgaggtcgtccagatccccgagcgtatcatccagttccgtgtcacctgggaagatgaccagggtcagctccaggtcaacaggggttaccgagtgcagtacaactcggctttgggaccttacaagggaggattgaggttgcaccctacggtcaacttgagcatcttgaaattgtgagtttctccggtggccccctggtgggaaccgccgcacggagccttcgctgatctcacgacgacggtgtctcctcgtgcgctgtagcttgggattcgagcaaatcttcaagaacgccctcaccgggctcaacatgggaggtggaaagggaggttgcgactttgaccccaagggaaagagcgacaacgagatcaagaaattcgtaagtcgagtcgagtcgagtcgagtcgatacccacacccgacgtcacgtcgccgtatgactaactcgccccgcttcgtcgccttgctactagtgttacgcctttatgctcgagctctcgcgacacatcggcgccgacaccgacgtccccgccggtgacattggtaccggtggacgagagatcggttacatgttcggtgcctacaagaagtaccgtaaccagtttgccgggatcctcaccggaaagggactcacctggggtggttcctacatccgacccgaggccaccggttacggatgcgtctactttttggagagcatgttgagggacatggaccacaccgacttcaagggcaagcgggtcctgatctcgggttccggaaacgtcgcccagtacgccgcgtacaaggtcatcgagctcggcggcaaggtcttgtccctctcggactctaccggatcgttggtctcgaccgacgacaagggtttcaccgtcaaggacgttgccgagattgccaacctcaagctcgagcgcaaggccttgaccgcgttcagcaacacggccaagttcgagtggcacgaggacaagaggccctggactttggtctcgagggccgacgtcgccatcccttcggccacccagaacgaggtcagcaaggaagaggccgaggctttggtcaaggccggtgtccgatacattgccgaggggtgagtccaccagcttccagcgctttgcctcaccgcgcgaaatcacgagtggctgaccacatgacgtacgaaccgatagatccaacatgggatgcacccaggaggctatcgaggtcttcgagaacacccgaaactctgccaagtcgctcggtgacagtatctgttggtacgctcccggaaaggctgccaacgccggtggtgtcgccgtctccggagtgagtgttcccctttgcccgctcgcgtcccgtccgccgcccccggatcgctgaccacgccgtcctcgtcctcgtccgctttcgtagttggagatggctcagaactcgggtcgtcagcagtggaccaccgaggtcctcgaccagaagctcaaggagatcatggccaactgttacaagtcgtgcttcgaggtcggcaaggagtactcggagaacggcaagaccctgccctcgttgcaggccggtgccaacattgccggtttcttgaaggtcgccaacgccatgagggaccagggtgactggtggtagtcggctcgccgccgccacacaggaccgggatcgaaaaaaagaaaaggcgcaagatagaagggaattttaacgacagggttttgactggaacgtgtttgcgtgtgtgtgtttttcggactcaagagaaagaagggggttccccaacttgtagatggtttctttctccgccgccaccccccaatctctttttgtatagagcggacggcgctccccgcttgaacgagtcttttcccccctaccgcacgcccgatgaattgggcggacggggaaaataacctcgcgggtcgagctatactacattgtcatcatcatatctcatatcatggtcatcgtgcgtcgggtcgtccggtcgtatcgccgtcatcctctgctcagatttctatcgaacgacgcggtgcatgctaaattctcgactcgtaaagtcgtccatcaacccgtcttcaccctcgatcatcagccggatcgctcgttcccgccggtcatcctctgctgcgggtttcctgtcgaccgtcatcgggcccggcgtcgccgctgatgtcggcggtaccgttgtagctgcactcaaggccgtcctaccattgtcggccgtgcaaagacgagtggtcggtaagcgaccatcgaatcaatctgacggatatccaatcggtcgctcacccaggtacgccaaacaccctgatcccgcggacgtgggtgtctttcccgttcaagtggttggcgatgatttgaacacggacatgaaaggcaggcaaaggcggactgtgatggctcagtcaggtcagcccgggttacccgccgtaaggaaacagaggttcgtcttggcggctgtatagatgtagactggatatggacgaggagggatgagacgtacccttcttccttttcgacaatcgcgtcggctccttcgccgatctgcctgttgatcgtcctcaacgtgtagatcccccatccatctggcttgtccagatgtagtgagcgcacctgcaggacgatatcgcgttgtcgatttagctggggaccattcatcgaatcgaatgaggtatgcagggaaaactcgcctcgaccaggtcatagtggctcgtccctaggaagatgctgatccgttcaggagtgtacgagtcgtcattcgagtgcgagagacaaatgtgcacagactaggcagcgcaggatctgtatcagcatgggccctggtaacgaacgagctgaactttgcattgatcatcagactcacggagacgaagactttgcgggcaaaggcgaggtcaatgttatgtggctgtggaccttctgatctgcgagaggtcgattgaaaacatcaataacagatgagttgtctcggtaatggaagagtggactcgctgccagaaggtctcttcgttgccatcccgtagatgttgcaagccaaagccaaacttccggctagacacgctccaccgggcgaggttgccgatgtctttgtgcgcccaaacatgtttgtcagagcatgtcaggatcaaggctgtgactatagagacggggaggtgatgatgacttgccatacgaagctatagacatttaatatgggttgtcgcaagcgaacgggcggtagtctgatcaggtggatatggacattccgtattcgatacgaggggagagcagtacccgagccgttttgtgagcttggacaggaagacgtagctatagctgaccagcatgacaagctagaagaatacagagccacctctcaggcctctcaagatagctagagtgtctcatctttgaaatgtcaacaaagtcgtgaccttctcgaaatttgcttccgcgactccctccatcatccacccggtcgatcgatcacgcccaaagtactcttactcgtttcgattcacctcgagtacgagttatcagccagcgtctcacattccacactcttccaaaatacgtcacactgcactcaagaggactactcccgagattcttcactttcagccggtccgctcccaaagcacgccagagcctgccgatcacttacatccccatccatattcgtcatcacttcacgtccccattccgacccatcatgacggattcgagctcgaacaccaaggtcgactcgtaccaaggagtgctacagcggtacaaggtgcctcagggaccttcgttgccgatgtttcttaacggaaatctgaagagcgacaaggcggtgagtcccagtcgagctggacgtgatcaggtcaagctgattcttctctgtccccgctatacaatggttctctatagttgatcttgatgggcggtctgtacgacggactggtcagtcttccttatcatgatgctctgagcggcttgtgctccgaaattgggtggacgacgtgagtccgcccatgtgtggcatactctgctgcgaagaagacctcgtgactgaggggagacggagcgtttcagggtacagccttactggacgggagcttatcatggcttcgccatcggttctctggagaagaataccgaggaactcgaggcggcaattcagcacctccgagctcaaggcaagtctgcttgtcgactttccccttgatcggtctgtttaccctatcataccctcggcccgtggcagggaaaaagaccatcgtcgtccttggctcctcgaccgggtgtcaggacattatgacctacctcctcaaacgccatccgtccacgcctatcgagggaggaatcctacaggctccggtatccgatagagaatgctttgacgaacccaaagtgatcaaggctgggcagttggccgaggagatggtcaaacagggcaggggccacgagttggttcccagggaagtggcaaaggaggctttcgggatggaaatggtcacggcttataggatgtggagtctactctgcgtggggtgagtacaggtagggaacggttttaacgaggcgaggtgttgatgatcgtacgggccgaacggggaatcgtagcggggatgacgactttttcagttcagatcttccagaagaagccgaagagcagaaaacagacggggtaggtcattcctgtcctaaaacctgagctgttggcctctcagcccatacctgatcccatgaaactatctttgtgcccctcgacagccgtcccaccgtcccctctccgagacttttggcaagctccccacagacactcctctcctgttcctcttctccggtaaagaccacagtttccccttttccaagacgaccccccaggcgcagtttgaacgatgggaacgcgctgccaagaaaggcaagaaggagggcgagggcgaggtgaagatgcagttcgggttggtggagggggcgagtcatcaggtggacgagatcgacttgcagcccaggctcgtagagatcatcaagaccttcttattgagcgtttgagaagtcggtttcgtgccacattagatagccgaagggctcgatcacagaacgggttgcaatgacgtcgaccaccgatgtaaggagataccattaccgatattacccggtcacatcgccgttagcgtttagtgcctgcgaacaaatattactgagcttgaatctccggctctcagccctcgaagcgcgatgtcatccgacatatcgaaatggtgtctgaggtgtcaggccgagttacatgggaaggcaatgccgtcgacaacagaagtggacgacttggacgcgatacacgaagaggtagtaagctgacatactcgactctggtgtacctaggtgattagctataccctcgtcgttcaaggtctcgcagtttgaccctctattcgctgcgtccctgattgttatatatgctggaaactccactgtcgatcgtctggtctgaggaatgaggctgaaatcagttgcccgtctcctgatcgtcatcaaacccaaggtggatagtcctcgctacgagaatatcgctagcatagatatgacatcttccctcaattattcaggtgtgatccggaaacccccctgaggatcgctgtcagcagatacgccagcccaaaaattagtgcatagctcgtcaccatcgatcaagttgtgaactcggggttgtggcgtgatgatgctcgaggcactggagactctgatgaattcgtatacagcagcgtcatctactctactacaaatagaagatgtagccatccgtctagtctgacactctcgcacctcgtcgtcacatcgcgcacatgccatggactcgatattgatggttgaccgactttccactttgttcgagaaccagtgtgtggcttttcctagttcaagtgggcagaagaaggctcgagaagggcgacgcgcgcttaagaagggcaaaaagtcgcgcttttcatgtgacacgcgtctctggtgctcctcctggcctccctgccttccctgccttgcctgtgtttcccgcgctgtgatcgcgttcgctcccaaacttttcccgaggtaggatggggagtgccacgctcgcacgttcaaaagactctacatcaacaacctccttccacttcaacgtcccttcgcccatcatctcctcttcttcttcatcgtcttcagattacatgtgagtacctaggactatcgtcatatcagccttccatcccgtcgtttccccactccatcaccctgccgcctcttgatgctcaactagtaatttgcgattgagggtctcgtctcgacgaggcccgtgaaaccaaacactatcgcctaatatataacgtctgaatcgacaccgcttcctcacgtccgccattccggatcgtctcgatagcgaggagcaccttgactgattgcgctccacttcttgctcccttgtgcttgtcaacgtgtctccttagatctttaaacgaacccccaacaccctcaacccaaaaatgtctttcacctccctcaagcagctcgacgagcacctttcggtccgatcttacatcgacgggtgagcatccagtttccgaggtcctgctctctccccagtccactctccccctccatcccgacccccggcgactttttttttttatgatgaacaactgttttggtccgtgtttccgacacaccgagaaaggggacggcttaagaccccgcgcccatactttctcactcgtattgacgacaacaacattccaaaccctctgactcgctaccccttttgataatctcgaatccggattgaaatttttcgcttagagtggaaagctgattctcggttcatttcgattgggactcttagattcgagccttcgcaggccgatgtcggtgttttcaccgtcgtcaagtccgcccccgactcgaagacctacccccacgtcgcccgttggtacaagcacattgctacttgggaggccgaccacgccaacttgaagggagacgccggcaaggcccctatgctctccctccctgctggtgaggagcccgccgctgccgctgctgccgccaccggtgccgccgatgaggacgacgatgtcgacctcttcggttccgacgacgaggaggatgacgccgaggccgagcgagtcaaggctgagcgtgtcgccgcctacaaggccaagaaggacgagaaggccgctgccaacgccgccgccggcaaggacgcccccgtcgccaagtcggtcgtcaccatgcaggtcaagccttgggacgacgagaccgacatggaggctctcgaggccgccgttaggtcgatcgagctcgacggattggtttggggtctctccaagttggtccccgtcggatacggtgtcaagatgctccagatcaacttggtcatcgaggacgagaagatctcgctcgacgagctgcaagagagtgagtcaacgggttccagcgtgggatgcaagggggagagacgttgaaactgatcttttcctactcgtttgtagggatcgccgaggaccacgacgaatacgtccagtcttccgacattgctgccatgcagagtgagtgccgctgatagcgccgacttttagctcgagaacgttcactgacagcacaccgcttctcctccccgcagagttgtaaacaagcgcacatcccgcgtttccttctgttttcgcgtcgagggtagatttcgccaccaattgccctccttgcctctctctctcccgtccataccaaacctcccctctgcttctttctgataacgatgacgacctgtgttgggacgatcgtccctgtggtacggtcggaccctgcaggaacgaaccctctctctctcttccccatcgaggggactgaattatacaccaaaaatgatcataaacatgtgcaaaactgagaccagaccaggtgctgttgagagggaccgcgagttttgcagtttaagatcaagattgtgtaccgcggatttgtgcagggggcgtgtctttgttttttcgcgcggggaaaaagatgaccggtgcgcgagaagtgggcggtctgaatgatggtggatctcggcgctatttgacgtgcaataggggtcgcgtttcatacgacaggaccaaggagacggacgacacgggtcggcagcgtctaagcgatcacatgcttatttcagcgtgcgatgatggattcggccgtcttgaatgtcgatttttgagtagctttgagtcgtcccagcgcccacgcacggatcccagtcgccccttcgcgtggaatcatccggctaccgttctcttctttgcctggtgaagcaatacgggcatggcgtgatggatgtgatggcttcgtcatcccgaaacatgtctggaagctggcatcccaacgtgtcaaatcatcaaaagcttctagctgattggggaccgtgcatgatgcgttgggcgaagcccattcgcatagacgggggtatcaaaggggtcctttagatcgaaatgtagaagtttcttttctagccgattctttgttgcgcggcctccatcctttgggccgggaagcgtgtttccgggttgttgtcatttttttggcgtttcgggtcatcaaagctaaatcaacatcagcagggtcaataacgaattttgatcgaaagagccaagttctggatatgatatatacacaacaaggtttttccatcacattccaggagagcttcagcacctgttcatgaacctagccagaatggaaacggagcacaggaatcgaatgacgacgcagactcggactcaaacgaatcgtgtgcaaacaatctcggccccctcgagcccttcaaccaaagccaacatcaaaatcaaccctaggtctgtcaatcatcccgaatttcatagaaagaggtcccactgatgtagcgtcttttcccagattcgactcggagtcggaacaagaaggtgtttcccgctggtcgtccgagactgctacacccgttcgtcaacgaccgcctcacacaccgttccacaccgggctcttaggaacaggtatccacgcccttcacttgccccgcaaaatctcgttccgccgtaacagcgtagggtccaccgagaagcctccaggcctcgctagtgatccccttgcacgatctctcacaaagtctcacgagggcgaaaaacaagcttcgttgggtaagaagagcctggtcaaaggaaagcccaagacacggcggaccatcatctctcccccggtcttgctatctacaccggaacaaaaagccctctctggattcaaaggctacgagaccatgtccctcgtcagcgggagattgcaacaagagttgggtaacagaggggagggtacgggtggataccaagggcatggcaaggctgtcggtaacgtcagtctgacgaacaagttcccggctggccgtcccgtggattcgcaaaggaaacacccaaactcggcagcgggaaggcatagactaggcacacatacagagggagaggaagaagaggatagtacggagccggattcggggcatctggcgagaaggaggtcggtcaagaaggctgctgaatgggaaagaaatgcacacggtaggccaagaatggaaaggcacaagtaggcggtatatatgtcaagctgagaggaatcttttcgtcgtatcgttcggactcacagctagcccgcctttgagcccgggtgaaggtttcctagccaaagacctaggtcgaggtccttacctcgcacaatctctcaattcccatctgggtcactctcgtcaggtatccccgaccccacaaccgggccatcgtcaaacgtattcgcaaactagcgcgacctcggctcagggcagacggatggacagcaacgttagctggataccttttgatcccacgatggaaagtccggaagtgagaagccccgtgcctagctttaccgccgggcttagtgttagcggggggtcaggaaacaaagcctcggcggaagacatcttgagagggtcgaccctgtgcgctttgtaccttgtcagcgggttgccaaaggtgagaatgttccggacatcataggtgacaaggggctcaaggaaatgtgagaacaggacgtcaagtcgtggtcacttgccgacaaggacgctattaagggagctgagcccctcgaagatgcattaccgtgtcgcttcagacccgaggtcttaggaaggacgtttggcggtcaggtgggtcgaacgggtatgaaactcgggtgtgatcgaatctctcgattgatcggatttctggagaacccaccggaatcaaacctccgctctccaggcgcatcgatgacctcgctcgcgggggaaagtcgggcggaaagctcaggagcggctcatagtttcgtcagtctcgcagataccaaagcaggcggatctcccctagaggccgcggcgggcggtagactgcacaagatcctcaacaaggccctaaagtattctcatcctcgagaaggtaagctgtgtgtcattgtgcgcgggtgggacataacggctaatggcgatcctgggcaacttacagtcgagatcgtcaactcgacattggctcctcctactacaacccatctcttcagttttacgatgcccgaagacgactcattgatggggacgcatagtctggggcgtatcacgagagaaccgatgcagtccagctcgttggaaggcaacaggactcaggcaatctcttcggctgccaatgacgacaacgcacgagagatcacttggtacggcgtatgcttgactgtttggaatcacgcagatccggagcgtgctagacggctcagtctcgtcaagaaaaagctcactatatcggctcaggacgtgctagccgcggatgaggccaccttaatggccgggacttcctcgatctcgctcgccgctcctattcaacgaggctcgcgcgcttccgacgggatcaacatgaagcgtcgcgcctctggcaatagaagcggatccgagaccgaaccgaattggacagactcggagtacgaaggcgccagaacgcctcgacaagccttgagggggtctttcttgactctgccattagtctttagcgatgtcgatggggagctcgtcaacgcttttcaaccggaagcagacggcatgttctggataccgtatgctttaactttgggtcagtaaaggccgtgccgtcaaacgtgtgaagtcacactgatgtgtatcacgatggcgcagtctccaagtacccgatatacgattgcatgatcgactaccttaagctttcctgggctaggttctcgaaaaatgtaaaggcacattcgatgtacgtagctcgatcttggacctgtcaaaatccggctcatatcagccgcgcaggcaaatctcgcgcattctcaactatcccactcccagagctggggaccccatcaaactactcgccggatcaccaggtaatacgcacgtagaaatcaatgccgatatgcctggttcggtcgacctccgtacgggactggttcatgtcaattaccgactgtggccgttgtggcagatgttgagcattgacaatgtcttgacctgtctcgaagtgggtctccgcagggactctggcttcgctcaaaacgctgactagtggcattaggtggcactgtcaaactcaggacgagtagtatttgtctcgcgatatccggaagctctgggcttggcggtcaagaatctgacctacatcgccgagctgaggggatggcgcggtctatctctgccgctgctccatgcggtcagtgcgcctgacgtcaatatccctgttcctgtcgatttttactcttttataacagcgtgacgtgacggttttggttgaagacccaggtccttatatattggtgagtcaaatgacgacccaaatttcagaaaagtctggtcataccgaccgctttctcctcgtagggtatcaacgccgaatgtcgtggtatggtgcatttcatgccagacatgctcgtggtcgatttggatcacaagtgagtgattgttgtcatcgctcttatcgattggcgattgacatacgcgagagctcttcagtcatctctccaatcccactctacctcccggtgtgatctcctccaggatacagcgcgacaagatgagaaagaggattctggactgctttggcacgttttatggttagtctcgtctactttcgtttgaattgttcggcgctgaagcagcttgccgatacagtcgccgaccattcgataccttcggaactcaagctgtcttatcccggcggtaaagttcgagccagctgcggaaacgcactcggttacgccaacccatcgttcctcggtgatgccctgcgagctcctgcatggtggaacacgaccgatatcatgagtctcctcaaaatttcggcagaaaaggtcagctaccagccagtcaagccgaggcgattcatgactctgaccataccgttgatcgcagtccaagaagcccacttttatccagaggctgatcaagagtagcccgcagcgccagattcgacctacggtcgcagaggagttggcgcgtaaagcaatgaggaatcgagcgcgtgcgttgcttgcttgcctttcaaaagctcatgtctcgatgcgtgctgaccacgaccatgaaatgtcagtccgctatgtccaagctcgagatgaattcgaacagaaagtggcgcgtatcaacaagcgcttgatccatctgatccgtgaaggggaggcggtacgttcgcgaatgttagcggtaagtcctgtcgatcgagctgaaatgacccgctttatagtggaagaagcgtttcgaaaagtttgaacggtatgcggatcggttaggagcagaagcagccgacctcaaggcgaagatcgaggcggaaaagaaagaggctagacgcctaagtggagtggtcagccaaaccaaggagcggaatacggcgttgcatgacggtgagttctggtcgtctagtggtctgattcgctaggaggatgagataccaaacttcatcttcttagagctgaaaaagaccgagcatgccaaggaagaagccatgaaacagctctccgacatgcacatgtccatccaggagctggaaaaggagcgggacgaagtcatgaatgccatcgagctgcaaatcgagaatgtcatggtcaacattctggacgataggtctgacatggcctctgtgactgacggtctccgaacgcctaccgccctcactcacgacacggctcattcgccgtccgcctggaagggcgcgggcgacaatcgaccaaagcggagtaccgtgacattctcgtctgccgatagtcaatctgtacgagctccttctatcttgcaaggagagatcagtgcctctcgtgacgtcaagaaaaggaggtcttccattgctacggccaacagctcgaccaaggatcccctgcgtcagctggaccaacggctgaccatcaagagcgaaaaaatggcggagaagatggcgagcatccaacggaaggtgagtttacgagaaatctctagctggtagcaagcatggttgcgcgccatattgagtagcgtttcgcttgctagttggacatggcactgcaagcggtcgtggaaccccacggcggagacgatcgggatgacccagtcactaaactcacgttgaaaacgaaaaggtccagacgagatgtcaagcgggcgcaatccgagcctcaccagggtgatattggtgaagaggatgatggtcatcccgcagagaccgctatcgccacagtcagccccgctgatcctgtgaacgccgctggtgagatggcgcccccgaaatcggggttcaagacgattcaccgagtcagatccaacacggtcttggcgaccattaccaccgtcatcaagatggaggaaggcggtcacggtcaccatcaccgtcgagctagcgtagactcgcgggtcaagcatggtgaagcgaggtcccgcgtgtcccttgtccccgagctcgatgatcagctggacttgtcggtcgtcgccggtgaggacgacgagtacatgtctgcgggagacggggaagatgaaacgggaggcagtatcattgaggactcggatagtctgagggagatgacagaggccaagaggaaagctagggaagtcgacacacctgagtcccgaatcgttgcttaaatgaagcttgattgaaatggcgttctcggtaatagattgattcgatgagacccttgaaagcagcagtatacctatagtaatacagtcgaaccccatccttacatgattctacgctgcgggggggtatgtccccatctatcccctacttggcgcggccccaaatgtcccctgcttccttttcgtccgatccggtcgtcgagatggagacccgccttccgtcccccttgacgagcgtgttgactacgaacctcgtatcggattccgtagggctatgatcatccttttccgaatggtccagcgtgtgcaagctctcggcaggttgaacccgattgctaacaaacgtcgaggctcgtggcttgtccgaatccaggccggtaatctcgtcctcctcctcctcctcctcctcctccttcaacgcatctcggttgctcatccgagggtgcgtcctcgacctgtcgctctcgtcggccatttcatcgtcctccgggtcatccctgaacaagtcggcgtccttgtcggcgaaagcgaccgaacgaccgaaagccgatcgagggggttcgttgggcatcctcacgtcccgagggtcgagatgagtcaggtcccgcatgcctagaccggggatggcgatccgtccgacggattgcgtctgatgtgctgcggtacctccgaatgagcgagtgggatcaaagttggcagggatgtcaaaggcgttgtatgactttgtggggttgaacgtaggagaggtgacggaaccggtctgggtccattgagagctggagggcgggaattgggaggcgagagactctcagctctgtactcccctaggtgcaaagctacgctagaacctaccggctggcttcctccttgttcagccggttgcgcttgaaacagccgtaaaacccgacggcgaaagcgatggcgaggaaaaccccgcagaccgtacccatctatcaaaggcgacatgaggaacaagttcagccgatagcctgtatgttgccttgcggagaatggaagactaacgatgatgtcgatcttggaagtcacctgcgtcctgtcgatgatcggggcgataggcaccgtgccctccggattacgcacggtcgctgttgaagcgggtgagctgcctatagtcgtagccgggatattgacaccctgtagtcaatgttttcagcataatgcctcgaagatgaggaatactcagggaccggcgatggctcacataaagggaacaggtgtatgacgcatagtcgaacgcttgttgcacgacgtccaacgactcgcagtcagagtacacacatgtctatatcatgaataccttcagcttatcaaacctcgagatctgatcacaaagtatggactcgcctcgatgctggagagaaacggttgactctggcagagacaggcaaggtcttggtatcccggacatccggtcgagtttccttcctgaatactgtcgaaacattacagcaaaggatgagtcgatgcctcgtcgtgttgctcgaacggggaacctaccatttcaaagcacagtccggtatagtagcctgtcgatctacgagcgagggaaacgagtagtcggattgagttgcgggtgccatgttcgtataggcagatgagtgcagttggaatcaggctgttcaggttctttcgagcgaggtgataacgtgtgcggtcgcgagtgcgtatgaaacaagtacgctggcataatgtacatcttgagagtgttcgatgccgacttgaatctagaatgactagcaccacctgtcgagagaacaagaggtcgaggtgtgacaagaaaaagcaactagttggaccagagacaaaaagcacaaagagcgaaggtcacaaagtcgccaacgccgtaaatgtcgcgcgcgggaagtgaaccccgttcgggtgaacaaaagacggaatcgaccgagcacgaggccgagggcgtacaatcctcctttccactttcttcaattgggacgacgtactgtcaacttccacagctcaggaaaggctcggtaccctggacaattgtgaacgagcaacggccacacgaaacacggcatccgcaagcacgacgtaaatggtgtgtctagtatctcatccgcgcggcacgtccggcgaggaaaaacagagacatctcgtaaaacgacattaagagttcgattctaagtagtaaaagaaagacgataagacccagaagagaaaggagaagagagatgggaaaagagagcgtggggtgtgataaggggcgttagggggagaagagggacgcaagatcgagaacgttcgaatccaaaagagacccgagtcgtaccccaatctggcggccgacgacgtcgagactcgtctacttgctgttgacgataactcggtcctgagtggggaggttgatgctgtagatcgaacacgaaaatgtcaacatgccgtagacgcgacgagcgggacgttcgagtactcacaaaatgtcgtcggcagggtgtcggtacaagggctgcttgagcaacttttggtcgaggtagtgaccgatgaaaccggcagatcgtccgagaacgaacagaccattcagactatacgcacaggcaggaaaacgaacgtcttggtcagcacgacatgtacttctggtcgaaacgacgctaagcaaactcacgctccgctcttcaagtagtcagcagcctcctcctcagtaaaggcaccggttcccttcaacaagtcgcagaacgagacggcgatggcaccatcgacgttcaagatcaacgagtccttcttggcgctggtgaccgactcgacgccgagggcgtagtcgagggtaggggtggcggggaagtgcttcttgacatagtcgacaacgaggacgacacgcaagtcggggttggtcttggacttgatcttgtgtccgataccggggataagcttgttggcctttcgcatagagtcgacgaattcacgaggagtcatgccagactggagaccacgggtcatctcggcggcggcaccgtcgagggcacctccgaatcggtcaccgatggtcaagagaccggcgacgagcgacgagatgagatccttgccggcacgggcggtaatgatggtgttcatggcacccgagacggcgggaccgtgatcggcggtcaattgcaagaccatctcgataaacttgcaggcatagtcgggcaaacgacgcttgaaccacaagagcgagatgactcctccgataccaatctcctccttgaagacgtccgagatcctcatgccggcgtacatgagctcttgaccacgctcgtccgagatggtcgagatgaaagcggcgggctttcggatcatgccgagctcttgggcccacttgtagtccatggggatcgagggagggtcacgctcttccctgggggtgatggcaccctgggagacgagcttctcgtaggtcgacttcaagacggcggggaggtcctcgaaagtgtcggggacgatgaaccctgcggccttcatggccgagttcttggcgtcggcggtctcgaggtccgagttggccatcgaaccggcgtgaccgaactgaacctcggtggtgaacatcttggcgcaggtaccgatggcccaggcgacgatgggcttcttgatgattccctgcttgacggcctcgatgactcggtactcttcgatacctccgacctctcccaagaggacgagcatcttgcactcggggtcctgctcgtaacggagcaagtggtcgataaaggtggttcccgggtatcggtcacctccgatggcgataccctcgtaggtaccgttggtggtgaacgagaggatgttgttcaactcgttggacattccacccgacttggagacgtaaccgacggatccggctcggtagagcttggaagcgatgatgttgtccatcatactgcgagtcaaaggggggaagcgcgattgtcagctcgacacgatagtggatcgcgcgcctttcgcacaactactcaccctcccgagttaccgatcctgaaacaaccgggcttgatacctccgacggtagcgggtccgatgatcaagacgttcttcttctcggccaagtggagcaactctcgggcgtgcctctcggggacaccctcagcgatgagggcgacggccttgatctgggggaacctcaaaatgtccaaggtcgaagcgtaaacggatcggctggacgaaaagttgacgacgacatcggcgtccttgtgcttctggacggcctcctcgatcgaggtgtagacgggcaagagggtctccttggtaccccagtagaacttttggatgtggtgtcctccgaaggggtagatcatggcggcgaccgaaggggtctttcgtccacacgaaaagtcaaagtcgagcattccctggatggcacggggctggagaccaaagacgagcgatcgggtgttctcgtcgaacggcctgtaggaaggacgtccggtgatggcgtcaccagtggcggccttgaacgagacaatgtcgtcgctgggctggtgtcgggaaccgtcggccttgacggaaccgagaccctcgggagcgtcagggacggccgagggggacttttgacccgacttgagctcctcggtgaccgaggcgatggtgggctgggtctcgtgacgctttcgctcgactccgagggccatggggacaatgtcggtgatgtgggtctcgggtccaaagaccttgatctcgactccgagcgactctccgaggagacgcatggccttgagaccttcctggtagttgggaccacctcgtcgaacaaagattctgaccttgtgtcggatcaagggttcacggtattccttgagggctcggatgattcccttgaaggtggcggcgacgttggtaaagttggcgatacctccaccgatgatgagcaacttgccctcggggtggggttgaccccgggtgatgaggtcgacgatggtcttggcgtactcgtacgtctgaccctcggtgggcgcacccgagtattcaccatagttggcgagctcgtgggcgaacccggcggcggcgatggcgtccgagtagacgacggaagcaccacctccggcgaccatggtccagacacgtccctcggcgttgaggacggtgagcttgagcgaagcaccggtcgatccgtcgagcttctggatccaggcctcctccttggtcaagtctcgaccgaagggagcgggccagaccatggggggaccacggtcggccttgacgccgggagcgttggcggcgacgggagccgaggtgtcacgggcgagggcccatttgggtccacagaggaagtcggcggtctggtcgagcttggcggccatgtcgaggtagtagatctgaggagcctgtccgttgacaccgtccatgcagatcaaggggttgatctcgaggtaggcgactgtgcgagagagtcgagggagatccacgtggtcagtgatcgagccggaaggaagactgtagtcgacggtggctgccacgacttacagtgcaagtccgagtagactgcgtagagcctgatcaaaaagtcacacaaggtgtcctgcttggcagcagggacctcgggcaacaaggtcgagatgatctcttctcgcgaagggaactatcgagatcaagcgacgagagaagaggcgcctacgtcagtacgccggaacgattcctctcggtgagtggatttaatgcacgacttacgcttccatcgacggggatcaagagcttcttggccttggcatcgacatcaccgacctcgacaccaccctcgctgcagattcacgagaatttcacaatcgagtcagtttttcaccgtcggtcgctttcgtcccgttttcttccccgtggctcttcgtcactcactgggtgaacaagatccaatctccctccctggccgaattcacacagacgtagtactcggcctcttgagggtgaggcaaaaagggctcgatgatgaacgtgttgagggttcccgtggtcttttcgaccgtgacgggtttgccagcgcgttcctgtacccaatcgcccgagaccttgtagtccttgttgaggcagaggagaccggccttgcctcgacgcttgatgagctggtcgggcttggcgacgagcttgtctgtgggggtcgacaacgcaggtgtgatcagccgtgcggttccgaggtgcgtgcaagggagacatgcgcggggggggactcgccagtgaagacccattcgggcaatccctgaccgggctggacagggggggagagcgacttggtctcaaagtccctaatcacatcgcattgcgaacctctgatcagaaactttttctctcttcgtcgcaacgccgacgtcgatggactcaccattgaacctgagcgaccttgacgggagcgaccgaggattcggccttgcaagggataggaacgggggaacggggcaaccagtaggagaggagctgcttggcgtcgtactcgcggatagctggggttcaggagagcgggcaggcgagaggacacaatgtcagcatgcggtatttttttctttttttgggtgaaacgagggaaagcagatcgcggttttgtgcagaggatggatgaagaggtgataaaaggtccagatctacgggtagaccattctcgagatctaccctcaggggatgcgaaactcggaacatccgctcatcacccaattcgtgcgggagttcgaccgtaccccccgcgctcggctcgtcgtctctcgactgcaaacatgcctctgatctctaccgaccactctgtttccgagcacggaccacgacgaaattcacagcacgctgcagctctttcacaccgggtactcacgcttggcagacatcttgaaagaacgggggaggtaaagatgaggagagggtaaaagaaagtcgcgtgtagtaagtgtgtagggtgggttggggaaaagagaaagtcgccggtcctggatgaagtggaacgcggtctgtgttgtgttttttgtgttttcttttctggtggttaatcagaagaagaagaagaagaggcggggtggtggttttggaggaatgagatgtgaggaagagattgggtgaggacgatgatgatgtgttgatgtcgcgatggaatgtgattgatatctcgctctcgacgtttgctcgctggtgactttcgggtcgcggaatggaatgggatgggatggaattggaatgataatggggagaaccgcgcgggcgagtgatgcgaggagggcagcagggcagcagggggaggcagaatcgaattttgcatccgctcactcgcgctcctgatcattcagtcgcgtgtcgccatgtacccccaaccaaaaaccgaaccgactttgggggaagagccacgagccacgaggccaggcaagcagccaggcagggagcggcagtggaaagctcgctcggaggcaaccgagtcgcgagtcgaggcatttcgtatcaggtgacagcgaccaacccacaatgcagaggccgcagaggaggtggaacgatggcgcccagggcccaaaggacagtcatgctcgcaaatcaactcatctctctcgtacgcgacatctctcgctctcaaccgattgacatcgcgtccccgcgtctttcgcgtcttttgggggaacagggcaggaaccgcgtcgtccaaccacgccgacagagctacaggcgagggatccgctcatctcgctcaacgtttcagcctttcctgcttctcaccttgcacctgctcgacctcggactttgacctatcatccatgtttgttcaggcgaaacgactactcgtacacctagaataatgtccacaactgttccacgaccacagcgtacgagtcgggctggtctcacgctcggaagccttccctgtatcgacccccggccgggccactgctggacgtattcgtacccttccccatacgtcgtaccatgttgagatcgcaccttgactacgggcaacgactcttttgcaagcttgttggcttccgggatctgtcggcctctgcgtatccccgctccatgagagtgcaatcgctaaccctctggtgactcttgatgatccggaaactcgtggtatttcccgcgggagcgtgacgagatgcccggcccgacaacagacttgcataaggtcagacctggctagcttgtgctgccttttacgatcttttggacgatctcctcgatttggcgggtctagatagctcgggaaaagatatctcgtcagtcggccactcatgttacccccgagtcgaccgagtcgcagactcgtctatcactcatggttggatcgaagacgggcatgtaggcgctactcgatgtacttgcctgtgatacgttcgactctgcaacaaggtgtgacagaggtgtggaatggtgaaaccggcagacctgcccccgaaggtgcaagtcgagtggattccctatccgcggatcgctcgacgcgtcgccaaaaggagctgggcgttgacatcaaaacaaaagaaaagagtggatgatcattcaaccaacgctgttcctcctgccgcgccgtgccgtcccatcaacgcccatgcgtgcgtgcgagttcgcgctccagccacctcgatcctgtcagtagtgtcccaacactaccactaccaccaccaccaccaacaccacagcgacaccgtctctccagcctcactctccgacctcgaacctcgtctcctatcctctgtcctcctctgctcgctcggtgtgaggcgtcggatcacgtcggatcggtccatgatccatgatccatcatcttgatcgagcctggatcaacatcctttgatcttttgatcaagttcctctttctttcccatccgacattcatcgacatatcgacaaccttcgacttttacgacctcgaccagcaagtattctccggatcccggcgcctactttgaccacactcgttcatcaaacacactgtcgtttcactcggacctcatccaccactaaccaccaacgactactaccactattgctcctcgcaaggcctttgacaatacatcgactcttccatcaaatcagcactcgacatcgcgttccacttgatcatagtcacatatcgccatcagcaacttgacatagcaaatctaggccgcagtttcctatctcactcgacccctgtcgaatcactctcgttttacaacttaccaggagtcaatacatcacaacaaataaaacaaaaccgatcgagatgctcttccctaccttgacgaccttttccgccgtcctcctcgctctggccggatcttcccaagccatcggtggaaacgcgcacgctgcccgacctcgtcgagctcagcatttcggacgtcaacagcagcaacaacaagtcgaggtccaagctcaacctcaacctccggcgggtgccaaggtgtttaccacccacatcgccaagcccgaggggtacaacactacccactcgctcgtcgatggggagatggtcaggaggggagagggtgttgtcgacctcgaagctaggggtggacctatcggaaagagggcgttcagcgggatgagggcgacctactatgccgtgagtgtcgagcgcagggattgatgacagaggagcagcgagatcgtggtcaaagcaaaggctaaaatggatctcgttggacgttcgtagatcgggttgggtgcttgtggacagtacgagtgagtacagcatctagcgttttctctcgattccagcccaaacgacagtcggggtctgacgaaacgtcgtcccattcttcccagtgctgagccggcttacattgtggcgctcaactcggcccagtacggaggtaagcatcatgccgcatattcgccccgagccggacaagcactgatcgtgtgatccgtaattatgcgcttttcgtaggcggttaccccggtcctcagtgtttcaagagtatcaccatcaccggtggaagcaggaacggacatgccgtcgccaccatcaaggacgagtgagtcgtgctttccgcgtaacgaccgatcgtctctcgcattggctgaaccgtaccgacgattcgctcgcaggtgccctacttgcccctacggaggtctcgacatgagtgaagccttgttctcgtgagtcgtgtgtcgtgtccgcaggcgatccatggggttgttgctgatgaacctggacatgtcgttgggactgaatagcaactttgcttctgccgacgagggtgtcgccaccatcacctggtggttcaacgatgatgccgtgagtaccaaagtccttgtaaaagtccaggggatctattatcggctgtgctgactcgaaagcacgacacgacagcctcctcctcctgcccctactacgtcgagcgctcccgcttggaccccggagcccgttacgtcgaccacccctgcttggactcctcctccttcgaccagcaccgagccggcttacacccctcctacagtgagtatggcgtcacgatctcgttttcggtcctgaattgaccgtgacgcatctgttcgtgctcgtgtccccgttttagacttcgtcgaccccgacctcgacctcggtttggactcctcctgtgagtggtggcctgatgtatcgtttcaactgtagttgttgagctgatctcgacattgccctcaccagcccaccacctcgacctcgtccacttgggtcgcccctaccccgtcgagctcgtcttccgttgtcgtgtcgtcgtcgagcactgcggtctcgtcgtcttcgtcctccagctcggccgtctcctcgtccgcctcgtcgtccagcttctcgatgagctcgttggctctcggaaagggctccgcttcgaacaccgcctcgaggaccaactcggccggcagtgctacttcgactgcggctgccgactctgacaacaacaacgaggacgcctactacaacggtgccactggcaacttggagatgctcagcgacgtcaccttgcaattgggcaacatggtcgtcatgagcgctcaacaggctcgataagcgcccgaggcgaggacactccctgaggagagcaggtcgattcgggtcgcgaaaggtcgaaagcgctaggccgctcgacctgacaatctgattcgcacttgaccgacacctctcggttttctttctccccctgaatgaagcattgaaaaggacgtttgatacggacggttatatacctctttttctgcttctcgaagggagccacaggtcactctagacgggatcccgagctcctttcccgttacgtgtgtttttacctatatcgccaggactcgtgctggtctgttcaattttgtctctcttcatggtctctttacctgtctatgcaactgtttcgattagagcgtcgctggtgtgctcacagcctttccactttgcgttggttgtggctgaacgcgcgggtgcaaagtcacaaagtcgtcatgcacacaacgcaccggttgatcagataggggactcgcctgctctcctccctttcaactcggaacttgacctgatagatatccattctcgtccgaactttcatcaacagctgtgtaacatcgcatacaccaacatcttgcatactcctcgcatcactccgccaagatggcagcgacgacgacggaatctgcacgtcaggccatcaacttgcgaacgctgcaacgttgcgatccgacgatccggaccatcctcgactcggcaagctatgtcgtgctttacaaatacctaggcgggaagtggaccaaggagggcatagaggggagcctcttcgtgtatcagaggtgagagtcgaaaagccagcgagaggctgtacagtcggcttaaagtaaggagggacctctgctcgacgactcgagtgcaggacgatctcgccgcaacagggatttctcgtcttgaaccgcaatggcatgaacaactttgtgcggcacttgacactcgggacggagctcgatatacaggggcagatcgtgcacgttcatggaggagacgagaagcatgacggcaagtgcttcgaattgagctcgcgacacgatgtgtgcttacaacgcggggcgtctataggcatctacggactatggttcgcaggaggagaacccgaagctcagcgtatgatcgatgtcatgaaccagtcagtatcgaggcggatcgcgcaaaattcgtcatctatctgtccattgagagaaagggacgtcgccgcttggtcagatctatcaatcgggttggtaacgatgggccagccatggcctctaattcagcatcggctcagtcaaagccgctaccagcgcagcctaccatgcaggacctactggcacgcctgactgtggccccctcgacacccccagcgcaatcgcggtcacccgctctgacctcttcgcaaagcgctcagcaatttcagaaccgcgcatcaccccgacctgaaccggcgcagaccatgaccacgtccgtttcggatccatcggcctccctgaaacagctcttgggggtcatgtcacccggacaaacgtcgtcgacgccgaatcggacaaacacgccgccggcgagactcgctccagagtcgccctcgatctcacgaccgcgagtcaagaagggagattcggggtacattccttcggcagacaggaacgtcgaaattggagatcaggggttggacaaggaggccgctagggtggccatctcgggggcactaaaggggggtcgggcggaagccaaggggattcagtcgggaagcacagaaccgagtaaagaagggcagagagatttcgtcagggggttgttgaattgcatccatgtgagtcttcaggtctgtggtttcaacgcgctctagctgatcattgtcgaccgggcagactgacaaggactttgtggaggagctgtataacgactatctgcggaacaagggtggcggccggtagatggtgacttgcgggtgacgagtatcaggcacatcgacgtcgtcggggcatcaggagggtgaattagatgacatgatgcaatcaccgctcggattcctccctactcacttggagctgaattgaaggtctctgtactgagagcgagtgagggcgagcttccatgtcaccaagtcgtgctcgcctgtcgattgacagcaaggtccctgggcagtcagtccggccgagttgattgcactcagcttcgagtacattgaagagacgcgaccttgacaactctcagcgggcatcccaaacaacgcttggtagcgagatttacaatcacaacgagagctatatcgttgctcaagaaaagttctgatgctgaaactgtatggacatgatcatctcgtcccggaaaaatggcggtaaacttcctctcgactgcgcatccgaacgaaacggtagagttcggcctcagtttctgttcgacgtcgtcgtggcttggtatgcaccgactgcacacgtcaagggtacagatacgtagcatgctggacatcgttcggagcttgggttacaacgtcgatctcaatgacaacgcgcgtctcgtatgcgagatcgatgacaagtgccggccggacgctgtcatggcacagacgatgccctcgagagcgggctcgatgatactacagaggttgattcttgcgtatgatcagacatctgagccaactgacgtgcaagtcttatcccaatgtcattcagtgcatggtcaccaaggccaagtccaccagcactttcaaaaggactcacatcttaacggaccgtgttgactccgccaattgactctctacgccttgaaaccccaaaacgtattgattcatgacgcaattgtcgtggaaaagctgtgagttggcctttctggcttcgtcgagcgaattttgaaaattttgcagagcctcttcgtgccactcgagcttctctctgagctgtccgttctcttgaatgaaatactcgttgtcgcggagtaactcgtcaatcttggtggcgcagatgtcacaagggaatcgttcaccagtctgaatcgattctccatgtatatcggtcattaccgaggccggcctcgagggaagcgaggtcatgtcaggcgctgtcgagtcgggtggcaggtctgtctgagtcgatccgtcaacgggggtagctctagccatcgattcgactgtcgcgtccgtttgagtctgcatgtcggcgtagcttcctccggaatggccgccccagtagctttcaccttcgatcttagcttgcgctgcctgaccctttttttttctccgcgtttttttcttctgtgcccctgtcggagcttgaacgagttcgatggtctggtcgtcaagattttcccgtgacggaaatgtaggatccacggtcgaactagatatttcagaaaacgataggcaagggttatttatgaaaccaattgttcgctcgagtgtccctgcttctactaattcggtcaagaagtttgcgcaacaaatcggacaatccatttctttacacgcccgtatcagggctgggcaagcagggagatgaaggatgaggaagtaaggatgaggtcatcaattccctgaagttttatttcgagtccaatttacctaaatcgtgttttggtcccgctatgaaagcatggaagtcctggatgtggttctgttggcgatccgaaagtagcttcaaagtgtgcttatcgactgtagtggagcttgatcagacaaaatttgacaatctgatctcctgaaatgaacttgccgggcacctggatcactttgtctctggaccctttgtaggtcttcagcgtctgtaccgaaagatgacaattcttcagaagcgcatctgagcggatgtcttcacgctctgctttgatgaaagcctcgcgaccttgcgttgcggctccagctttcttggccgatccgtacacatcagacaatctctgttctatcatgttgtaaaaaccgcactcctcctccgagggctgatccggatgcgctgtcaaatcgcggagtttatttctggaaaagatccggagcgaatctaacaagcacaatgcacggtactcaccgcctgagcacatagcgtgccatttttctgcccggaagctcataacagtccaatcagccaagagatatctcgaagtgcacaagaggatatctggaatcaccaaggtcgatcgatatgaactctgtaggactcatgatggtggcagaaggagcgcagtaggacgagcagtactagtattccagaatacgatcgatcgctgtaaatttttcggtacggtgtccttcaatctttataatttccctctccaaatttgagtactcccggatagtgttcgtcacctatctgttgagtaaaaatcacaaaggaggaccaaatgacgcatttcacaagcccaagcggcggctgaaatctgacggaggcgctgacagaacagtcgcgcagtcagtaggtattgccatggtgacgtgaacttgaggcggcctttcagcttgcgaggatccagttgcatttggaaatacttgtttcgctccctctctcgacttcagagcacgtgatagattgagagcccttcctttctttgtgttttcgggtcttggatgtcacgcgatggcgttgatacgaggagactaccaattgaaccctgacagaacatcatcacatatcaaaggagcttttgtagcgtcgggctcattcgcgatacctcatcgttgactcgagccgagaaacaagaacggctgttatgacgggtagttcccgccacggaacgcgtccgccgaactctactcactgcgctctcgcccgtcttgtcgagagcatactattgcggccagactatagagcgtaatggtgtccacgatttggtgacacagtgagcgagactgtgtaaattccgatcgatgtaatatccccagacctgacgatagtcttctgaatcgagaaagccccgcgccacgacggaggtcagaggaggcagatgtcctttccgtcgagctgtccctgctcggggtcacgtggtgtacaaaatcgcagatggactgccgtgtccagtaagagctatgtacagcgtaactcggccatgcgctttgctggcggaggaattacagttcagcgatcgaggaattgcgagtcagggacccaccacagcaacggacgcagaacgggtccccttgctcgcatcgcatcgccacggtgatcaggttcagcccaccaatcctgagtgaatcgctcttgcaggcaaggcttagccctggtatgtcgcaccggtgtaagggaatcacctgtaagcagctgtaaatggcgccgatctcgaggtccgccgagagcttgactcgaaattgctccttgtaaatgtactagagtcaaggccctccatttgtcggtatatagccgttcccgcgaggatcgaacgagcagtgtgatggcgcgattcttgcgagttcgtgcgatttccagcctagcacctgtgccatttgtcacagctatacgcaccgtcgggatgtggcggaccgcgcctcgtcatcgaatgtggtggtcacgtctgtttcaagactcgtcccttgagcccggattgcggcacgaggggtaccgtgctcactcttcggtaacaatcgtaagggggtaaggcatgtctaggtaagctatctagggagtctatcacgcagctacccatacaatttgcgtcgcgatcgctatcgaagctgacttcgccaccggagaaaagatcagcagcgcttcgatctttcgcgtagactcaattccccgcgaggcccgtccaatcttccctatctgatctcggcagagtcacgcaaacgatgctattcagaatcggttccttggctcgtcatcgatgcgagtcaagcgggaaagcattcgtcgagaggctggcagcgcgattccctttgctgagaatggtatctctgggctacgttcgcataccaccattatcgttccctgcggatcgtatttgcggacgttcggaaacgtgtgcatgagcgcagaggtcaccacgctttttgatccactcgcatcgggctcgtgatgccaaagtcccgtaaggatgctcttggttccggggtcctttaatctattagccggatgcccgtgatcgcacgccgaaaatcacgtgtcattatccatgcgtttcatctcgtttcatctcgtttcatctcgacgcccgcccggaggcaatcgtgcttgtagatccctttcgacccgtcagaccgaagatgtcactccgcaacgcggacgttctgtcaagccatcgatcggacagtctgaaggagtcgcgaaaggattgatcgttcagggacgagggccaggctgtgctgttcatcgggataacgatgattcgactgtcaattcgggagacgaggatgaggtgcatcgacgatcaacgatgtctccaggacagatcgcataattcgagaccaacgttaccggtacatccgatctaccattcatgtatcggcgatattttctgcctacctcacccacatgccaaagcaacgcctaaaactcaacgccctttgcacaggctggggaatcgagctttgcccgggtaagaagagagcgggaggaagggtaaaccgctacaaggaagctaacgatactgtgcccggttttcgtgcaatagaccaagaggctcgcaactctccagcgaagacgaagaagctcgacaagcgtaccttggggaccagtaggacgaaaccctagtaatttggccgtggccaaaatgtacgccggtcttggctgacctgttatcgaacctttctcaaccaatctccctcacgtcaaacctcctcgatcggaccctccatacctagcctcaagtcaatcggagctcaggctggtttcccgttcgtcaagtgtaaaggtaatcccaagaacccaaagagagacgctctgggtaatgcaggtcattgggatcagctggacggaggatggatcttcaagaaggcgaagatcgggctggtcagtgatgggcctgaatcgacccttgacgcatagactcacgatccttgatacctactccataggccagagaacaggcagagtgggtcatcaagcttgccgagcaccttcatcctctaggtgcatagatctgccgccttgcgtagactcgcgtcgcgaatcgccactctcactacggatacgaggctttgtgctgacgatcggcagctttcattgccaggtctctggccaggggtcaacaccaaaacgcctgtcgatgataagatcaagaagaatttgctcactgccccacccggtaccttccagggcatagcttacgaggacttgattctggatggatggaaaaggtacctgccaactagtgttgcgtcgaagcacgtgtccattctttcaatattggctcgagaccgataaagctatctcatatgattttccgccgacgagcttttcctgtacatctcatcgaagcagcatatatcacgaaatgaagcgagttcagaaagggtccatgccgtgctgttacgctgtcctagcccttcgcctgtatgcgttgtcaatagtcgcctctagagtatcgccgtcgaccggacccagagccatgatgatatggaaaagcttgacctggaaagatctgaacagatagggtagttcgcatgcactcagaccgtcagggatccccagtttcaatagtgcgattctatacacgtcaagcgaccgacctgtattcctctcgtagcgcaacggtccccgtgtcatttctaacgatgctgatgacgcgacccgcatcgtccctaacgatctcgtatcgatcatccgagttgagattggctccgtagaacagtaaaggaggatagacgatcttcgtaatttcgaccgggctattggcatctccgagcgaggtggtcgtggttgtcacggacgcgacttcggggtcggctccaagcagagcgcccggtaaaggcccggcttgagctctcccgagtccagtcggagattggcaaaagtgtaggttactcagtccaaacaggtacgctgatttgccacagaccgagcaatcgcatcgtaaaaggcaagattgcttgttggtgtcgaaattggtggaatccgagacgtaatccatgctctgggttatggttgcctggcggttttcgctgtacccggatatcggcacagatctcgcaatcttggatctgacatcgatcggggttcgagcgcgaaaggttaggctaggccaattcccgttcgcgtgatgccatgccaactcaccgaacatgttccatgtattttccgattcgttccgatagctgctgttgcgacatttcctgcgtattattcgtatcgctagcgagagagactcgagtcaatagagcaacaacagcgcatgaatcgttctctgttggtgtacctgtgccgagtctcgaaagcagcagcagcattgatggaaaggccgagagctgtgccctccttgcacttcatgagcgccttccaccacttttccgatccgcgcttgatggaaccggcttccagggaatgtgaggtctgagtgtttttctcgaggaccccgcagagtgcttccagctgaacatttcaacgtggacggcgcgtgagcgaagaggtcgctcgaaagatccgtcttgtccggcttacctgttcccttcgctcgtcagaatgaggtgaccccttggcagggatttgcttttccaatactacctttcgcatgtgaagagccgacgctgtcgcggcctctcgtatagctgcctcctccgcggcatcccatccgattctgttcctcctcaggcgggtgaccgtggaaatgtacctgagccagagtacggaagtatcttcgataaaagagaatttcttaggacgctgcgatatatttgctcacgagtatgccttttctttcgcgtggcctaggtcagccaataggccagaagtcgtcgctcgtgactaggatcagggaaatctcggtcaatctgtctttcgtcgcgcgaacgaaagaaatattactgacgatgatttcgtctcgaagttcctcgcaacaaccaggaccgctaaacgcaagcgctcgagccatgttgtaaagttccacttggcagagatagacaggatataacaaccgttgaaaagaggggttatacgcgaagtaacctggatccaacatcgtgatgacgactgattgttgaaatatgaagaccttccctgactgctgtaaccatctctctccctctttgccacctttgcccttgcgtttgtcgtcccattcgacttcaagtgtttgttcgtcgccgagttgccgttcatcattaatttgccattcctcgacgaattcctgttgtacatcgactttccctgggtttgcttcaagtgcagtggacgccaggtaactcatggacaagatcacctttggtttgatgatcttcaacaacttgtagagccacaagcaagcaacaggaaagttggtctgagcagtggtgacattccaaagatctgcaaaagggtgaatcttgctgatcttgttgacctgctcgtccagatgctgccagagttgtggtccaggtccagcatttgtcgaccaaaaggtgctgttgcctgaggaatctctgacagttatctctttttccaacaagagacataccccgtcaccaagtgcttgcttcgcttgcaatgttgccacctccttgctgacaacaccataggactcgccattggtctcttccaattcaatccagaaggccctcatctgcatgtagagatctatgacttcttgcgcgagagctgttgataccgacgcatcgtctgcgagttcgtgtacggatgtcgtcgggagatgtttttctacgagttcggttggtttcgacgcgtcgcctgcgaattcgtgtacgaatggcgtcgggaaatgtctttctgcaaggtcgttcggcgccaaataattgcgttgtgccaaacctcccggcgcgctgttcatcgatccaagtttccccgcaagcacgaccatatgttcgaggtcttgtaggtcgcgccgcgaaagccagatgtcttgaggggtgattcgaggcggggcttcgcaagcatccttgcccggaatatgaggctgtttggtattcgatacatcttgccccaattcgataaattcgtagcaagtaaaggcgtcggcttcggtgaacctcttgatccaggtggtgaaaagcgccgcgttcatcgattgtttgagagtgacctcgttggcgactggaatagtacccagtcagtaatcaacacggacgtagcaatcacctgatggcaaccaacctgtgtcttgcctgtgcctctgcaaaggagtcgcggcgatggtctggccaaagtatcgcgtgtagactgtgccggccgcgtcgacatcggttagagcgagcttcgcgatgaggttctcgagcatgcttgagcttttggtgcagatcacactggtacgatttgtacactttaatgaatctgagaatattttggtggaggagcttcattgggatacccttgtcgcatcgcatgtagagctgaaaggtgttggcgtccttttcgccctgatcgactgcaagcgcaggatgatgtggtgaggttgtcagagggtggactaccaaccgtagcaggtagtctacggtcttgggctggatggttacgcccggcgagggcggacgaaggccttggtctcgagcgagatcggataataatcggtccagtaacgttcgtctcaaagtctgctcgatagttgggtggtgaacatatggcccagcgagttcatcctataagtacgcgcgtaaaccagagtcgaatcagcccagcactcctgctcgcgaacccgtcacatactcgtacgcacctgaagttcctgactgatgtgctgctcgatgagttggtcacggaaggcgaggcgagcggattgccattccagttccaactgaatcgcagggtcgtcctgtgccacggtatctgaagcgaccgcagtggcattgttcggtgtcgtcgacgggaaggattccgatgagaatgatctggcgaggtgacgcgaggaagacgcggtcggaagcgtcgacgaggaggggaacgtctccggcagagtatcgaacggaaatgaggggttcatcgtgggatattgtggtgagattttgtttacggttgtagcttggagctctctgatggatgtgacgatgtcggatttgattgcagcggtatagtgcaggtcgaaagatgttgcgacccgtatgacgatcgcaataatatcagctagcagaggcaggatcacacgcgtattcatgatcatgcaaattttacactcgatcgtacgattctcactcgcagcaaggttgacgacgacgacgacgacgacgaacagcatgacacacgacgaccgatcgcagatcgttagcaaattaggtttggcgtgttgcgctttgtttgtgcggctcgatcctcgcgcgcacgacgaggggttcgggctgttgacgacaaaggacgttgtcgttgatcgggagaccagtacaacagattgccgtgagtcgaacaagagaggaggggtaggattcgcgggctgctgactttcgctatgacggacgatgcgggtcatgatggtcgttgtcggtgggaagctcgtgtttgattccgactacctcgaccgcaagactatgcctgggcaggttacgagagcaaaagggggttgcacgagccacgccagaagaccgcctgctcgggtaaaacacaggaccacctgcggatgcggacggacgggcgggctgtgaaacgaaaaggccgtcgtcggagcccaaagccagtggagaggctgttgcagttggaaaaacaggagacgaggcgtcgtggcaacgacgccacgaaatgaatgagaatgagaatgtgaccttgttctgaggggtcggtgtaatgggtatgttggtggtgtcaatgtggcgtacaacaagtggtccccttagtttagtggtagaatatctgactacgatcgattcatcgttgtgatcagggggtcgcgcgttcgagccgcgcaggggatttctttttgcgctcgatgcggtcctttttattcgcgccgttttcacgtcgcgcctatgatacttcgaaccgtcgtcgcgagcggttctcgactcgcccgtgcctgcaggtcgttgacaagatgccacgatcatcgcaatctgcggggacgacaatgcagctttggctacccggtcctctaaatgacatgtccgattcaattgcatattggtatgccgactttggcacgaacgacaactcgcgcgagtgtacaagaattctctgcttcgtggaacgcttcagcgccgctctcaccgactcgactagtacaagtccgcccgacgttcaagtcataaacctgtatcccttggggataccctcgagtgacccttcgtacggcttgtcctcctcgtcgaggcggtccagtactcggttctgccatttgagcacaaacttgatcgagatggcgccgcatgctaccgcaaacgaaaaggccgcgatggttgaacctccgttgatgtactttggcgcatccgattcgaggaagaaataggggctaaaagatgggcacgagttagaggccaaatcagagacgtcccgtgaccgcggaatcaattctgcttacctaaagaagtgactcgcgttggcaagaccgttgaccaaagacaacgccgcagctcgcttgatcttgggtcgaggaatagtcgacgtgagccaagcgaacgagaggttgaacgagcagtagctgcctaaagtcaacatgaacatggcagtgtatcgtccagcgatgttggtacttgggagagtgatgagcaggatatttcccaaggtggagatgagcataggaatggcgatatgcaatccgcgctcctcaaacttggaagacgagaccgccactccgagtgatgcgaaaaacgcaaagaggtatgggggcgccgtaaggagcagagtttggttgcgatcataccccagagacttgacaatggcggggaagaaacagcgagcccagtcaggctgccatcattgtatgctctcaaggcacgaataccccgatgcgactgtttcacttccggccaggcaacagatcagagacgctcttcctgtgatacgactaccttcgttcttgaaagaatcacagcgactcgaaggagcgttctctcatcctctgagagaccgcccacttttcgcagaagacaggcggtcaaaccgctggcaaacgaattctgatcctgtcggctggtcatgagattcgcgtcgccttacttctcgttctagcaacgcgtcgcgtcgcgtcgcgtcgcgtcgtgtgctcgtgatggtagaatagatctagtcgatctagtagtgatcggacatgctcatcagcttacatgagggcatgagacgacttgcaaactacaagatcacatgttcgcctggatcggatatcccgctccaggtgatccaatctgtgaacacccgtctcccgggacatatgtatacaccggcatagatatatagacttctcgactggcacgatcgccaaagccgataccacagcccgctgttggggacagcatcccccgatatcatcaagatcccgtcgttttcatgttctagtcatttttcatttgcccaaaatggtgcaagctctgcagcaccaacagcagaaaaggagacgacaggggagctgggccccttcgttctgctgccctccccctcgcccgacatcataccagtatctggggagcatgatgacgaggatgaggatctggaggaagttggcgttcatttcgctcaccaattcgatgacaatgacgagctcaaattatacttggataccgggcctggaggacagaccgatgatggatcagcaggaatggaaaaagcgacgggacaagcatacagtatagctgcaggtaagcaactggacttaagctttcaatgtatgcaggcctgtaactgagctcgagatctcgtatgaataggggagaagttggtagggctgccaaatgggcgacgctcggaaaacggagcgggttagtagctttaattcgagatgggaaagtaggaataggcgaccgagcacgtcattgtgcatcttataacagatgatgcagcgatgatggcagcgggggaggagaagggagacgtaacaggggatagaacgggggcagagaatgccagaggagtgggtgcgtaactgggcttttgatcgaccgaaggaccggcccactgattacaaagggctgcacagatttgcctgctgcctcggaggaatgtgccgacatcgatcaacttcccaatgagaacgcgggcgacggtcgattacccgacgtcacctgtcagatgatgcttgcggtcatggagcaggcatcgctacaacaacagggacggccctcagtctacacaagtaccgtcaagagaggagatgatgcccccatctccatcgcgttccgcgtagaagtccaagagattcgcgacattcgcagactccgcgagtcttgcgaccccattccttcaaaacccatcatcgctaccaattttggccacccttctcaggctacacgtcgcatactgtgccccacgacgcccgctgcactcgtcacccatgcctcggacctcgatcacatacttttctcccacaaatcgtctcgttacgagctgtggaggcacgcggttcgaaccggaacgatcgtgcgctcttcgattttctattcggacgaaacgggctctgatacccatcaaccgtcattcacggtatattacgtcccgctgacgcagcaacaacccgaaaccatgttattgctgaagaagataggagcgagaaggaggcacggaggacactggtactacggacagtcgcaaagacgggatcctcgggttgactggcagaccatcgggcgtcgagcgctcgaaaagtctggttcaaccctagacagatatttcattgatcacgaagaacagctcgacggcctaacgttacgctactggatcgggaagcgaaacgataccccgagcggacagtacatctgccctggccccggctcatacacacgagctcaacaagcctggggcccgttctggaacaagatgacggcttgcggtctaggcttactgccacccctcatcggctcgggttcaacgagtatagggtcggggaattcgacgagctacatgtccatcgctagtctcgatgggtcatcgccgtcgtaccagtggtctcagcatgtagatctgtttggcattcattcggataccagcagtaattcggattcggcacgccatgccttcctccagaagatgtcgacctcaaagttcttcgcctgggggctgcgtgtcatgcccagaatcatcatcactcccacaggggcaaccgtcgcaggacgcaacagttcagtcatcgcacagctcagaaaagcggtcagggcgggaacatctgtctgcgcgcgcaccaccctctccgccgcagtccgagcgttgctgagctcgtctggctcctttctttccactggcatcaaacgcaccggtagtcacaccggcaccaattatatcagaaaccacgccggcaagaggtacatcgaaggtcacaccgaccaaacaacgcacgtcgctcaagtcgacgatgaagcagagactcctcggaattgggaggaattaagattgattttatgtattcgtaatatctccgtaaattatggccatgccttgaagtagttgtatcgcatatccctgcagcctcgtaccccatgatatgtctgcctatgtcgaagctacacacaatcccgatctgccgcctttctaagtatcataacggtagcgttaacactcagtccgatgttcttattctaaggtcgaagagataagcgtcaccatcgcctcattcagcccttgaacacttcctgactcaccttcagcagtctccagcagtatttgggcaccagatcatggatactctcctcactctggacaatctcttcgacacattctttgagtgcttgttcatccatagccaaaccacggaaacagctccctcctttccccccggcctggcaaacagacgagattctttcttagaatcagcaagtgatcgaattgatggaagcaaaggcggatgggtcgtctttcggcgccttcttgtgcgcttgaccgacgcctgccgcgtccatgtctctcacctcgacaaaacagcgacggcaaacggaaagcccatccttattcgcatagcccaggaaatcgtctcttcgtcctcgaggagaccgcttacccgcagggactgcagcttgacgacaagaggcgcaagcttcagatgcagtaagggattcgacctcagtcagcgcggcctgcctgtcccctccccattttctgagaatgaagttgcgagccgtcaggcaaagaaagcagacaccgatcttgcagttttgccgaaggagacggatcagcgctgtgcacaagcgcaagagaaatgagcgaactaacctcgatgccaatggggtcgctatggacaccagaacaagggagacccatgctcgtgcaagtcgcatggccacaagcagagtacgaaagtacatgggccagtagtctaccgttgtgtgtggttatgttcgaggtctacgactcaacgacgtcaaccctgaagcagcaagaccgcgacagctttattgcttacctggtcgttgtgcacaagtgccaggtcgaccataaagtctgtccaatcgagtgtcctggagagcggactccacggtatcagcgatcgtcccaactctcaaactaacagcaggcgccagatttacttaaggattgagacggtgcgcgcgtggaagcgacacatatcgaggtccgagtgttggcctcgagggtccttctcccacctcatttcaaattcctctttcgcaaagaaacaggtccttacgcagcaacgtgaacgtgtaattggcttctcgattatgtccccatcctcatcctcgaccttgtcatcgtcgtcgttctccactgaacccaggccaacgaaggtgcgcatcgcccactcgattcgccgatcggacctccacgcgggatgaatctggtacattgcgtcatcgtcctcttcccataccgatctccagagttccgataaagcgagtttcggtttggtactgagctcggccatcgctgagtcttctaggtcacgaagttgagcgaccgtaatctccacgccttcagtgattgccaagaggattctgatgaaaggcgaagatgatccttgtctactgtggatgatctccttgattgcggtttgcttcccagcatcgagctccatgtatcccactaaatgaggagaagaatgaaaatacgcccattcacctggaatactagtgaccactaccgggtctcgttcaagcggcatggcgaggaaagagccagcatgtgagccgggttgaaagtcccgttcggcgattcggcggacgatccagctaataagcttcttccctccgcccccgttgataggtaacttaggaatcgactcgaaagggatcaagtcaggcgcggagtcggtcgatggtcgcggttgttgacgttcgagatctgaattcgcgtcaggttgcgttgggtgtgctgatgtcagttcgcggatggcacctatcaagtgccggtgtcatatacgtaccctcgagataccctgccgggaagtgatcccagctgaggctattccaagcttgggcgaaagtgttgccgatgtagaagttacgtcctattcggatcgggtctgcccccgtactttggccgatacctccccccgcctcatgatgatccatcattagactgattacattgacgggctcaggcagtctaccatggttgtaaaggatacaaagccgggcgacgtattcgattttcgaggcaacctcgacgcgagaaaatgcccctagatgtatcggacaagcatcgaaaaggaaggaggaagatccgtcagcgtcgtgtggaccagtatgcaatgtgcggagtcgtgactcccagcagcgtgggagcaggatgaagagtactggtgcgcaccgatttccaaccgaggcagataatcagctgcattcatatgggcctgttccaagcggcggaagctctcgcagcgatctagtagcctgtcgattcgttgaggtggtggtaagcttctttcaccttttgatctgtcatagcgaatcagtcacctgtccatgtttcgaagacctggaatttcagcttttcggtaacttcccttcgctaccgttgaacacactgctctttgccagtcccggggctcagcacgatccggagctcgtgtccgtctctccgcattggcgagacttgtcagataagaccatgacatcctcttgtcctcctgggcatatcggataatccggtcacccaaatcagccattctagctgatcctctatcggtaagccgccatatttggcttgcgcgctgtgcttctccttcttcttcttcttctgtcggcatatttggtatgaagtgtggtctaacagctagtccaactagcgataatcttgttggcgtgcatgagtgcgtgcgtgtgtgagatcggcgcacgtatcagaaaagccatatggtacttgctaaaaagagccgttatcctggacaacagaaatagggatcgtagggatgtaaattttacatcgagcgctcgggcaagcctaggtctacaagcttcagaaagagaagtattgacgaagagatggtgatccgttcgatgatcgatcagttgcaagagttgatgagccttggggtggactgatgaaaggacccatccgcaccttaacagacattcaagatcatggtttactgtgattgattggtcttatgatctgatctctgaatgatctgatgacgtgagcaagtgcgaagccacaaacaaaacaacaaaatggaaacgaaacatgtggactgatcactgatgaatggtagattgatgagcgatcatgagtgatcgtgagtgatcaatttatcgatctatgaaaacaaaatgatgctttatcatgcatgatgacccgatcgatgcgacgagatgatgaagaacttgctcaagttagtggatcagatccgctgcagctcatgcatcatggatcattgatcatttattgtgataccgacgcattgaggtgtcctaccacgccgcccaagagcggattcagtcaatatacaaccttcctctcaccttgtcgttttttatcagagcatcagattgatttcgttacaccacgaactgacgaacctgctcaacgaaacagtctggagtgtcaagaaagagcggcgtaccgtgtgagcatttaaacaatacataagacatgggcgctcgcaagcgggcatggccgcgctctccgcctcctgaaaacgtcgccggtgatgcaccgccagcgaaaaagcagaaaaaaccccatgttcttcccggcttggtggcatacctttacaacacccagaaggaagaggacggatgttcaagcgacgaatctagcgatgaagctggaggaagaggtgtcgaaaggatgtgccgttcggccaacatgggattacgactccaaatacgacggctcttccagagcggcttgacttccgaggtttccatcaagtctcagagctggaccttctccgcttacaagcaaggtgtctgtatcgagctcgagatcggccctttatatccggaaagcccacctcttgccattagaattgacggtgaagctgccgaaatcccccctgcctggaaacgcaccaaggtcgattatgcggatcttgtcagccagttctcggaactatttgaagggctggatgaggcccatggaacatctgcaggaatgcaaaaggagcaagacatcattgctcgacaaagagaggcgaagtttagtcctcccaggatcatcaaggaggtttccattggccaacacgagcttgagaggctccgtgggctggacttccgacgaaagggaggggaaagcagggataaaagatggatgcgcaaggggacgactggatcgagtgggaagggcaaagctaaggccgagtccagaaagggcgatgagagggtcggttcggttgggaaagtggacagggcgagcaaggggaagttcgcggagagcagcaagaggaggacctcggacgcgaaacagatcctcgacgaagagccgatttgcgtgagctcggacgaggcggatgaaaacttgagtgtaatcgtgctcgacagcgattagacagagcctcatcttgcgggaccgccggtatgtcggctttgttactcaagatcgcgatcgccctgttgatggcaggaccttttaaagtttgttcatagcaaaccacttgaagctttgggagagggatatcgggaggagttgatgagatgtacttggaccttcacgaacggaactgtagatccctttcgaccatcccttttaaacttttgtttttgaatggtgatcggattgtcaaggaccgtcgcgtagatcgagtttatggttagatttacgctatggagcggagatacaccatcaactcttggcgtttcgacgtctacatttcggccgaaggttggattgtaagaaaggtatacatgtatgtagactgactcggaaaattcctggatcttcccttctatcttctgcgatcacgactgagcctcaaggcatatctttacgcttcgcacctttacaagttttatcgagaatatctgctcgtcatgttttacagggactaccactttccgagctacactgagctgaaggtaagtgcagggtgagacgaaccatcagataacgatctccaaggccgacgctgcgagctggggcctgcacctaccttgcacaggatccgcaagtgaggaagatgtgggaagagcaattggtagacatcgtacccatcatgccatacaaccatatcggtcttccactttatgacaagttgagctgttactgccgagaatgcggaggggttcaacagagtcaaggagtctgggagaagcatactggatttagagttgaagaagccggttacatcaagtggatgatggaagagcccgagccagatcacgccggcgccggtgaaaagtcctacgatgagctcaacagggcaaacgggaccggaaaggatgtcgcgggagaagatggctgcaagaaatgtggatctcatcattcgggcgaagcttgtccttactgcggatatgtcatcggatagcttgattggaaaaggatgcaatgtttctggtatacggtcgccatgcacaaacatggataatatgtatacaaatgtccatcgagatgaacatttgttggaagatcaacatcagaatctgtggatgatgcgaagcgatgatcagtaacatggacacgttggttcttcatttgcctctcccatgcgtaccttccagtccttcatgaccagcttggctcccttgacgagcgacgtttcgccgccctcatcaggctctccgttggcatcctgagtggtcctccaaacggcgagacgacgctgttcttcggtgaaaaacttggtcttgctagggtaggaaggcaggacgaaatatacagctaccccgacaaaggcggtagcggcgccctcgacaatgaagagccatctccagccttctagtccacctttaccctcgagtccagagactaatcccgcagcgatcaatcctccgaaactgttcgacaacgagttcccgctgtgtgggcatgtgttgtaagcgaagcaacagcctcgggcgcgcttaatccacgacttacgagtacataatggcgatacggacctagtagcatcatgcgaaatgtcagcgaatgcacgagctagcgaaagctgttcaacgactgactgccaactccttgcgggtgtagaaactggaaagaatgagcagggcaccgggaaagaaaggctgcagcattggaacgtcagcgtcactcatgcgcagaccgccattttgggccactcacagcctctgccagtccgaccaagaatcgcaaggctaaaagctgaggcgcagttttgacgaatccgcagcacatcgaaacaattccccaggccagaactgctccactcaggaacagaacgggaggaatcttggcaaggatgaaaccggcaggaatctgcatggcgacataaccaatgaacaagaccaacctgcaggttcgtaattaatcaattcgatgctgcgaacaggcccgtaccgagccatctacttacacagcgttgttataggtcacaggtccaaagtcaagatcctccggcataccggacaccttcgcagaggcgatgttcgatcggtccagaatattgagctggcgggggcgaatcattatttcctttgtcccgggattcatagacgattcacgtcaacttacaaggaagagcaagaccaatactggcaagatcctccagtcgataagtcgcaccagcttcttcgacatttgcgccgtctcagcctcggtataaccttcaaacttggtttcgaccgtccggatcaggttagcatcggtctgttgaccatactccttgtcttcgatgagttcgatatcctgcttcttgtcaggtgagaactctcgggtgaggacatggttgggtgcgctcatcttgcgaggttgtgccttgtaagcttgtctgtcaggtcgtttcaccccctctctgcgcttcaattactgaggcaggttcgccccaaggctgaacccacttagttggacgagcgttctgcggtccacctcctacagcatgtcaaggtacgtcagcagatgattgcagtcctcagcgaacacgaatgcattttacgaacatgcgagcttccaggaaggcgatggaaggggcacactacaacggagcaccagaccactaattgcacttgtcattcccccttgaatgtggtatcgaatggactgggacgagaccagcaaaatgacacgctttcacagcagactatggcgcgcattgggaaccgcgggcctagtcaagtggcaaattctgatatgcatgatcatcggcttcgtctatgtacactttggatcaagccttgacagtaacggcatcagcactgggagcatccttgtttccaactccgtaccaatcgtggaaaccctgatcccaaatgcaacggtagcagcatcagcaaggtcaatcggaggagagacttgggccacgctggtcaagcacttacaagatcccatccgaataacggcgtgttgactcgcttttgtttaccggcgccggccatctcgttcagggtcttcatgtcctcgtcatcgagcttgatcactttgaggttgtcagcaatgcctgagaaggtaaaattggctcggtcagcgttcagccagtcttgccgccaacatgagaatgcgacttacgctccgcagtgaccgacttgggcaatacgaccacgccccggttgacctgatagctgatgcagacagtagcagggctgacgccgtacttttcagccacctgtatcaactgctcatccttgagcaggggtgctccggtcgaacccagcggacagtatgcctccaagatgattcccttgtcgtcgcagtatttcttcaggtcatgttgagggttgtaagggtgcagctcgacctggttgatagcgggaacgaccttccaggtctttgacaagtcttcgaggtaagggatggaccagtttgaaacaccaatcgccttgactttgcctacgtaaagcggcaattcccaattagctctggtccaaatcccccgtccaaacgcactgccgcacctgaagcatgcagctcctccatctgcttccaagtctcctgctggttccagttccggtcgaccgaccgactaccgtctgggttggtaggcaacaaattggaagtctcgttagcgacgagtcgactgtaggtgcgaatcggtaagttttccgttgagatctgttggcgtgacaagacctgttactcacacaggccagtgaatcaagaacaggtccaggtagtcggttccgagggacttgagggtttgctcgagcgactcggaggctcggtcatggtaggtgttccatctgatcaaattggacttcaacaactcaccccgatctcgcgctctccgatacaaggcacttacagcttgcttgtgatgaacagttcggatcgagggatgccagactctttgataccttgaccaacttcatcctaagacgtcagaaggaagcagatatatcaacacagataataaagcgtcttgtgctcttttctttgacactcgcctcgttctggtctgtttttcggatcaaagacttggacatcagatcctgttccactcgttccggaccagatccgacttacagatcaaagcacagtcgatgtgtcggtaaccagatttcaaggcgtgcttgacggcctctttgacttgtccgggaggagcctgccacgttcctgcagacccaattcgagtcagcctgacagtctctggtcgtcacatcgctaaaagttcgctcaccgagaccgacggcagggatcgtgtttccagtgttgagcttgaattcggatggaatcgacatggttgagtcttgagagtctgtttgaatgggttgttgagtgttaggaggaaaatagaaatacgcatgcagcccggtcgccccctcgacactatataccttattcaaccgtcactcattgataccgggccgagcggtccgcgcgatccacattggaagctttcatcgcgtcggctaagcgatcaagtgatgagaggcgggagcggcgatcagggcactgatggccatcgggttaaagatcgagaaaataatgaatattcaaaaacaaaagaagctgatggcgcattcggcatcccataatcgggggtatgttatgtgggttcatgcaggactggtctacccattcagtagctgctcatcccgtcgtatggtaggtgagggatataacgtgcaaggtccaaagacttacaggttgcaagtaatggtcatcattatcaagaccaggcccaagttcctaaaatctcccagtggaccattctacatcgctcgacaaccctcgtccgacgcagatgcacttcccggcagataccatgcagtttcatttccagtccatgaccgagctggtagaggtgagggcaagagagacacccgacaaggagattgtcagcgtcccggacaagcagttccaatacacgagctatacctatcgtgatatcaatgagggggccgaccgattggcacactactacagcaaggaggaagggctcgaggtcagagagcacgatgatgttgatacacgactgaacacgacgatattggcaccctcggcgattgattatgccattcacgaattagcttttgctaaaatgggtaggttcgagatgctttcgacctgaaaggtctccgggacttaccttggcgcttctctcaggccacacgctgctgttctgttcggtgaacaactcggttgcagccatcgcgcacttgctcaaggcgacaacagccgcgtatatggtcgttcacccgaattatgtcacgaacgcagaggaggctgttcgacaaatcttgcaagaaggaggaaacgcaccgagaatcgttcctcaggcccagcgtcaagtatggcgttcaggggcacccgttcaaccctttccgagggctctgacaccggaacaagagggccctcttcccgtattcatcgttcatagcagtggatcgactgggtttcctaaagtaagatccatacgcttcactaagcctcctcgcatttgctgaatggttgacgaattcgcagccaattgtgctctctcataaagcttcggccttcaacgtagctggcacaggttttggtcttgaagccatgaccaccttgcccctgttccacaaccacggacatgcttgcttttatagggcaatccattcgggaaagaagctgtcgctcttccctaccgagattccgctcaccaccaacaacatcatcgcagccatcgagaatgcccagggtgtacagggcttctatgttgtaccttacgtcctgaaactgctagccgagtctcctgctggaatcgagctgttgaagggatttgaattggtgacatacggaggagccgcttgtccagacgagcttggtgatcgactcgtcaaggagaacggtgtcaagttggtcgaacactacggcttgaccgaggtgtaagccgaaagttcacctgacctcctcgccctcgcttcagctcacataaatcgcccgctctcgcatagcggacaattgggaacatcgttccgagactttgaaacggataaggattggaactatatcaggtttagtggaccccatgtcaagtctggcgtggccgactacctcaagttcatcccgtcggacggtggctccttcgaggcagttgttctggacgggtggaagggcaaggtccggtcaaacacggatgacggatcgtatgcgacgagcgatctactggtctctcatccaaccgtatcaggggcatacaaatttgtcggacgactggacgacaccttggtcatggtcagcggtgaaaaaacgaaccctgtgccgatcgagctcaccctccgcgggaaatcgccctacatcgccgaggccatcgtctttggtgcgggaaagagccacattggagccctcatcttacccaccgaccttggggcaaatctggatcacaaagagttgtacactcagatcgctcatgtgatcgatagcgccaatgccgaagcgccaacacactcgcagctgatgcccgagatgctgatatttgtcccggcgggaacgactatccctcgagcggataaggcgtctatcattaggcccaaagtatacaaaatgttcgaagacctaatcgaggaggtaagcacgaactcgtttcatcgatatcgagtcaggctaattatacattacgcctgagcagaagtacgtaaaatatgaacggggcgaagcagctctaccaggcgaagagatccacagggtccggttggtgggtgaagacttggaaacatacgtttctggcttgattcaggcggtagccgcgtcaaaagaggatttgaaaccggaagaggatctctttgattacgggtaagcctgtatcggttttagaggaagtagaacccatattgacctcgaaatctccagattgaactctcttcaagcagcgaggatccggactaccctgcaaagggagctcgagctcaacggtacaatccttcctggcaacgtagtattcgagaacccgagcgtcaagctgtgagtagatccaacccaactgactgggtcatctagctgattaaattgcccttgcgctacagtctgtcaagttatctagaagcggtaaccaccgggaagagcaatgctcttcgagaaacaattgacgcggagcagatgaaggcgatgcagactctggtcgaaaaatactcgcacttcgctgaggtgcctccgtcagataaaacacctcctacaaagctcacaatcgtaagtatgcaggccacgaaaaaagcttatcaatctgccgaatcttagttcactaacctacatctttatgctgtttaggtcctgaccggggctacgggtagcttgggagcccatttgctggaccagtttttgaggctggaatccgttgccaaaatattctgtttggtccgggcatcatctgagcaagaggcgcgacagcgggtagatgaatcgttagcacaaagacgccttcccgggctttcagcaacatcaggggcccgagtcgaagcctaccaagcggatctcagtgctgccgacttgtgaggagctttttgagctctgttagaccgcaaactcagctcacgccgcctcttcactgcagcggcctgagctcgacggtcctggatacgattcgtgagaccgtcaccaccgttgtagcgaacgcttggagcgtaaactttacgctaaacgtggaatcattcgagaagggcaatatccgagcggcctacaacttgttgaacctggctattacatcgagatgcgggaggccagcagactttttcttctcttcttcgtaagtctcgaccgcgagcgtatcgaagctcccgtctgatcgtctgatcgtctgatcgtgctacgaggacagcgtgtccgccgtagcagcccatgctggcctggtcaatgccgaagtcgtgtcaataaaccctgctgacgctcaaggcatgggatacgctcgttcgaaatgggtcaccgaaaacttggtcgctattgccgcttctaccaggaagatccgcgccgagactttccggatcggtcaaatggtcggagacacggttcatggagtctggaatgaaaccgaagccattcctttacagatcaagtctgcgcaatccgttggagctatgccagagctatcagaggtgagcaagcatccgaaaagccgtatggagctgcaaccgacgatgaagctggttgtgtatagtccttgtcctggctccccgtcgacctagcagccaggtctatgtttgaaatcatgaacggcgaccagcgacgacccctttggcacgtacttaacggttcgaaacagactacttggccaactgtgcataaagcacttcaggctgccggaatcgacttcagcgtactccctcagcgggagtggatgcgggctttacgcgattcgtcgtccgatctgcaagccaaccctacctacaaactggtagactttttcggtgccaaagtaggtttcgctgtgtggtgatgtgacgagcgactaactgattcgtccctctgcttacagtatgacaccgacctcgtgatcaagcgagcaggatacagtatcgaggagacttcacgggcctctgctactatcgctagcaagccttatgtcgacgaggtggtcatcggcaagtttatcgaggcgtggcggtctacaggtttcttgcagtagcgtaatgtacggaaggcttagtcgcggtgtatgaatccagaacaatgttgtagtgcagtgcgcatcctttagacagatacagaagctacagaagatcgttttgagaccaaagtcgtatgcgcatatcgactcggccatcgttccttctgatcagactcctcgaggcaggtttcgatgccgtaaataacgtaaatgcaatgccggcaagtggatccacattgagagaggttcccgatcctcgacatgctcaattactttgattgaaaccatcgcctttcggaaaccaagcgaatttgtagatcccattcgaaatagctggtgagggaatttagctgcaactttgccatcaacccggtcgtcctggatttatggccgactcttcggagagtgggctgcggtctactcgtctcactgtcaaggggtacctatgtgaagagccggattgcaacaaaacctttgcgactgcctcgcacaagagacggcatatgcgaactcgcgagtcatgaaatcacacagagagtcttccaacatgatctgatcctgtattcccgtactctgaccggacagatactggtagtaaacctcacaaatgtcagttctgcgtcaagaagttcgctcgcagtgacgtcaggaaccgccatgagatcctgagccatccagacgaatcagttgcgcgtgggactattacagatccgagcacaaaagggtgagagagatgaggcgatgtcgtttgacgtttgcatattcattggcggtgcgactcggtcaacaggctctccagcactgagcaaggcgacgaaataacgcgtcaacgcgtagatacgtctcagggacacaatgtggctgctccagatcatgagagacaagagacgctcactgaaagcgccaacccgaggccaggaaatctcagtgaggatgatgatctcatcgccacaattcaggccgatatggctgggactgtggtcaatcgcgaatcgcgactatcgatgcgagaatcaccgcattggcaagaagactctacttctcatcgggaattcgacgttcggaacagaccaagtgaggcggagagtcatcccatgcatctacaaccgcagaacggccaacagcagatgtacgatgggttgaacaaccagacgggtgtcataagcggtcttacctataactcgggactgctcccatcatacgacctaccctatcccggcttcagaggtgaccctcagcgatacaatcagcagcaacaccacgtaccttccggagtcgcccttacatccaatgaagctggcatgttcagcaatgtagatctgatattgcaagcggcgagcgagcgtctgaccgacccaggcagcgggggtgagcagcagtattcggcacggaaatgccctcgatgggtcgttgatcctgacatccttaaaaaccattcaaggtcaagctctcggctcgaacctcgttggaggccaaccatctccgggcaactttcaatataatctcgaatctcctctagacggacttttgaccgcagaggtcttacacgacgtctttggttggggagttgcggcgggagagtggcagactcaagatccactgatgtgcgacatgttggatttcggaaatttggagatgaacctcgctctcggcgtagctcgaagcgcctcgaaccaagctggcgatgtgtatccaaatactggcttgcagcgctttgaccctcagcaagtggcttgggctgatcaacgtatagaagagtcttcaaacgcgaccaatacctacccagcgggaaacacgcaatacgtgaatggcaacagctcaccgggtcaggcaaggcaagacgacgagacagcatgggtacgtacccggcaagggataagcgaagaaatcgaggtattgatgagctgcatttcatagcctcatgttttccggcctactaccggtgctcaatcgagacgactcgcattgaatcagcccataacggcacctccaatgggaccgtttggccaacaggactaccccttcatcgagccggaaagagttggggtgctcattcgcctagctcatgtcgctcacgagactccttatggtaccgggatcgacgtggacaacttccctgacgccacggttctgtctgcctgcatcacactatactttcgccatttccaccccgtgatgcccatcctccggcaaagtgcgttcgtcaggccagacacgactgacatacaagaccgtacctggaggcgatctcaggatgatcctcagcatgctcttcttgtaatcacggtgtcggccatcggtgctacgtatggttccgaagactggaagccattggcatcttatcttcacgagctaggcagacgagtagggaaatacttggtgcgtccaatcgttgcgtgcgagttgtgcctgaagcgcagcgatccttaaccgccagacttttgccatcagcacgatagcgatcctcgctccatgttttctataccctacattcagtcaaggctactgcaagccttggcaggctacgcaaatggctcacgcgagctgtatctcgaggcggagatctctcgtggcctgcttgtcacagccgctcgccgactgcatctgcttcgccagacgcaaggcagaccagtccggttcaatccgccagaggcgagtacggcgccaagtcggacggatccgactgccagtgatcaattgctacgcgcttccatacatgcgagaaacgaccaggctcttgcggaaagcctgcaaagggaccgagaaaagcaatggaagcgctggctagaggaggaagagcgctgtagactaggctggggcatctacgttggtacaaactgctcccttctgtcatcgtctcgggtgctaaagtggcgttccctttagctgttcgacgcacagcttggatgtctgctcggaattccgtgccagtttgccatatccgaaattgtcaagaggctaccaagcgatgaagagttatggggggctccaaccgcagccagctggacgacgctcaaaaccgatcaaaagcggggacacgcttctgtatcgacatcagaggagagcgacttctcgaccatactcggaacccttctcaagtctcgggatctccgtagccgcctgtcagactttggcagcaacgtcattgcatactctctataccggttgagcgacgaatccaacaagatcgaccgtctgttcggactggaagatgcgacttcccccgatttcgatgacaccatgtcagcgaggcacatcaacaagcctttcggtgtgctggaagcactggccgaatcgtctcaagcgagggcgatgacgcgttcctcctttcttgtgggcaacatcgcattgcaccaccatgcccatctacgattcatccaccccgactttctggacatggtcagattggcagcgggcaagcaccagacccgcgcgagtcgacgcgaggctcgcaagtggctagaacgatggttggcttcctccgagacgctcgctaggcgagtctttgcccatgccgctcagctatctacgctgctcgggaaatggacgtttgacgccccgtgggaacctatctggctattagattgcgccttggcgatgtgggcaatcctgcagtttcttcccgaagcggttcctcaggcgggtcccgagcggttgtcaaagaacatcatcaagtgggacgattcgcccgatcgttgggtcagggaaggagggccgatccggttccaagggatcgggtacgcgctcaattcggagaacgttctcacagactttatcggcagactcgaagcgtctccctggggacttggcatgttgtacaagccggtagtcactcgtctgctacgtgaatcgcaatcgggatcgtctgtggactcctgagacgagtgaatcacgattgcgtttgaccccgacacaattacgaatcgcaaagaattgcgcaagatgtctgtcagctcgcccatatgtgatgaaaggctctgctcgagtttgcggataaaagtgtaggcatatggcgactcctcggtctgatcccggctctcataggatgaaggacgaggttgcatgtttcaggttgctcatcagcgaacacgaagttacggtttcggtttcgcggcatcgcggcaatttcgacaaagcgatcgttgcgatgatgtcgactagcaggactaggtttgtgtaaagccaatgaccacaggccgtttcccttcggttacgcgatggagaatgatgatacgcgaacgccacaacgtcgatggcgacgtgaaagagaacgacgaaatggctgatgcagggaggggggggtggcggagggttcaagtggcagaggagtcaggagcggatgaccaacctgaacacgttcggagaggccggtgggaataacaattaccataacggcggtggtaggggtcgaggtggattccccaggggacgaggtcgaggcggcggtggtggatatcgtggatccgctccgggttacgctccgcagcagcaacaacaaccaccaccattctgatcgacgtcgtcatccctttcacgcgtcgaggaagtaacaagaagaagacacaattcgaaaccgaaacctagagacggaagactaggcattttttttgtatttacgggcatcaaacgcatcccaaacgggttcggggagaagaaaaaggagaaataaggggccgggaatctaaacggtcaagccatatatactgtcgtgtcatgtatttagagcagtacaaacgacaatcttacgaataccctcatgtcatatgcatgcatgtctctgcgctctgttttcatcttggcgtagcgttgcatcacatctgcaaacccgtcgacatgccatctgcgatagcaaaatcagcttatatcgctgtccatacggataggagttggtccaggccagaattgaattctaatgttgtcttcgattgtactgaccggtgataagccagctcgctaataaggtagccatcaagtatctgcatgtcttgttttatggctacaaatccgacggctataggtgtgaggtcggttgattcaattgacgcgctcccgtcagcggtactcaagtggaagcccaatttgggtcttcgagagcagcctgaaacatgtcagtgtcggcaccagtgctcctgtgtggactagagcagagagagcctttcgtcaggatccatggatcgctatcatttgagaaggccaaggcagtctgccgaccgtattttcttcctctccgtagtgagtagacccgggctttggcttcctagcacactcactactaagacgtagtacacgtggcgtgattacgtcattattgacaaggaagattccgcgtttcggcttcgaccaaagacatgtaaactgcatctcgactcgattgatcaaccggacttctgtctacttcttagcattctcattcttcaaactctcattatacgcctgagctcaccgctgaattgctgcagaatcacaagatcagatagacccgctcgtcatggcccccatcaggaacaagcagacgaccaatcgcgctgcgatgccagccatgtctagctccccgaagacaggttctggattatccgagaccgaccaagagcagtgggcattcgcgaaagcagccaataagaagtacatggtttgatcctctgccggttctcattgcaggatccaagtcatggtcaggatggtcgctaaagagaagcgtgagccctgagaggaggaaatggtctctctgaccgcgagttcgaaggctcccttttccaggtcgatacatcgaaatgaccaaggcggagaccaagaaggaagtggagaagtttaccaaaaaggccgcgacgatcgtgagtctgggaggtttgcctactaaatctcgcgggagactgattcgcgcactgtccgtgcagaccaagcgacaccaacacctgatcaaaacccatgtgctcgagacgtgagtgactcaactaccataactcctggccgtggaaagcccgcctaatcccgacggcattcagcaacgaactttacgagagtctcacttcttcgctggaagagatcgaacgcgagataaaggagagtagcaaacatctcggaaatttgctcgagcagaaacaggtcagtctgaggtcgacaagaacggaaaggacagccgatgttcagctcatcttccttgcattcgtggtaggatctggctgtctctctcgagacttgggtcaaagagatcttcagcgaggccgatcaggaaattgagaattgtgttcaggccctggaagacatcgttctcggttagtgcgcccgtgtacaggccgtcttcgtgctcggtgcgggaattttaacgaatattttctaggcatcgcggccaagcccaaggacaagacgaacgggctggtcggaaaagatctcgagagggacgtgcaagccgaactcgaggcgatcaaggccgggtaccagactagcgagcagaccggagatcaccacgagatgatggagggagtttcgtgagaccttctaaacgtcacgcagatgggaacatagaaaggtttcctagagtatatgtacgggttgtatcgcactcaaccacaccgtgtcgaagacgatttacgaattgtctggtagcaacacatgtgtgacgacgaagcaaaaggcattgaatctggaaccgggcatcatccttgttacaacgggtcatcactgcctgccacccatgaactgctcagccctgtattattgcgatagcttgtttagcagcgaacagcgccgattattagcggacttgcacagtgcacttacaagtttcgcatctcggggtcgttcctaagcgactcgatgtcaggcataccgccaccaccttgcattcgctcggcctagaagagcaaaaaaggagcacgtaaagccgttgtaagcaagcctatcggcggcgcgatacttgggagagacttcggaacttgccatgtttcgaagcgaagggttcgacatcagtttctcaagacctccgttggccatcatctgctgagccctgatacaaggaagtccgagtaagtctcccgtagattgcatggaaccaacgttgcaactcacatctgcatcatcatggggttttgcatcatcgaagcgaggtccggcattccacctgccattacggcgaattcagtgtcagccatcgttgtagctgacgacgcaaaggatccgacttaccggcaccaccagcaccacccgcaccggctccaccaaacataccagcgagagcgctcaggtcgggcattccgccagcacccgcgccggcaccggctctagtgccaggtgcaacgacatcatcgtcgacatcgtcagcctctcggtcgacttgatcttcctgctccttggccttgctctgagcttgtgcgagcgaggccttcatgttggcgttgctgccgtcgagctcgagacccttggtgtaggcctcgaccgcagcggagaagttgccggttgagtactgggcgtgtctgcaaacaaatcgggaaggtcaggtcgtacaaggattgcagagctggttccgacgggactcaccccaatcgagagtaaccgcgaacaaacttgggatcccgcttcaagctttcctgagcatcctcgacagccttctcgtggcttccctcggcgctgtaggcagcagcccggttcgagtagtagatcgggtttgtaggatccaatgcgattgcctcgttgtacttttggatggccgagctgtacgacttggcggagatcagggcgttgccctccatcttgagggcttcagccttcttcttgtcatcggcagagggagtctttcccggggcagagggagtctttcccggagcagaggtggcctgggcggaagagctcgattcagcagcagcaggagcaggggcggcgggggtcttctttgcgttcagagtcttgagggcgacctcgaagatggactgcagactggcgggcttgatgctgtactgacggctgtcgtcagcagactcagggtcaacctcgaacgcctcagataggcattggactgatgaagagtcgttagatcagccaactgcggggtatctgatcagatgcaagtttcgggcatactagcaacatcgagcgactccttgtcgtcctcctttacggttccatcctgctgcgaggtcttcaggaagtcgataatgttccaaacgagttgcttcttcttgtcagccatgatgagtgagataaaggtatatgaacagaacaagaatagggtatggagtttggtatagacaagaaaggtaagctacctatgtacaggcaagcaacgttcccatcgtgatcaaaggacatgtctagcatgtcgtctacggtgaaggcgagaggggggaagctcggtcgcggaagctatttacgtcgaggccgcggcggattgttctagccggagctagcaacctcgtcacctcaacgatcgataacaatcccaatctccatcccacggcgcagggtcgaaaccgatggctgctgtacatgcctctgataacgccaggtacgagccacgaatatgcgtattggctccatctcggagtctcattgcgaaacaaatgcaatgtcatgtaatcgaaaggttcatcatcgctccacacgcgggatctcctttactatgcctagcagacttttcaagcagaagaggtttcaaatcgaaattcgtaaaatcggtcttggccgtgtcgtcattgagtcgaggtgactatcaagcgaggtgatcgtatcaagtgtctatcgccaaactttgctagagatgcgaaactcacggttaatcgaggatactaagcggaccggacatagacccggacgaccccatcggcgcctccgctcgcaaggactggcaccttgtcgccgaacttcacggcgaggacaccttgatcgctcttccgtcgatgatgcgaccaatcctgaccgcaagtcccggtagtgatgtcccaaatcttgcaggaacagtcgtcaccgccggacactagtgtcgaagacgaattggggtccatgtcgatcgcgtttgccgcgtcggcgtgccccactactgtcgatgtcaggcgagctgcaacgtcgacgtcttcgttagccatcgaggactaagtaggccctttagactttcgcaagcgctactgaccagtcttgctattgtagaaccgaagctttccatcgtcgtgggccgagaccactatatcaagggtagggtgacaaaggacctggttgcacggcgagaggtctgaacaagtagaacaacgtgagccctcattcacgaccagacgaccaagtcattggcagcatcatgaccaaccttctgcaccagcaccaaacgtcaacaccaccttgccagaatccagatcataagcccggacaacaccattgctgaacccgacaaggacattcttgaagtctggatggtacggcgcgatcgaaattgggaccggttgatcgttcctgctatcagatgtgctatccgtcccatcataggtccacgtccgaagcaacgagtatccctgcttcgaggtggcgtatagcggcgaggcatcccatactttgacggtaccatcggcgctcgcagagacgagatagccctcttcgtaatcgcgactcggcagcaaggccacatcccatacgctgtccgtgtgaccgatgagggtttccaaggtcatcgaagggtcgtaggacgagtaggtatcatacgtcggtggtggcgtttgccacacccggatggtagcgtcgagcgagccactaaagatgactccggtgtgcgcgacggccaatgatgtgacggcggccgtgtgtccacggaaagtcacttgcggctcgatctcgagcccggctccggcgtttctacagaagagcgatcaggttggtcagtcatgaatggcgcagagaacgacggctgatctcacttggaaccgacaagtctgctcaggtccagcttccagactttgactgtacaatcggcagaaccagaaactaaggtctctccggtgaaaccgaaagcgacgctgcgtacagaatcgaggtgactgtgcgacggaatcaagtaagatcctggagacgagttccaggtccgggactcggactcggactcgtatcgactgacctttttagctgccgactttgattccaatggcgcttggcgaccgccgccacctcgccggcttcagaaaggctgtctacagcgtcgttcgagtcggtagcgatggcagattcggctgtgttgcacaatgataccgccaagtcagttgagtctcgttggggagatttggtcatgggtcgcttactcagagtcccgctctcgatctgcgccttggcatctttttgcgcctagcaatatggtcaagatcagtctcctattcgcaacggctggggaagctgctccgcaaatgtaccttttcggcctgctcgttggcagcctgaagggcttttttccacacctccttgttctccggcttgtagatggccgtaaggatattgcccgacccgtctgatgaatccttcgacgagctcgaagctgatgaagatccgatccactcggaacctgaccgtttatcgaccgagctcgactctgagccagccatcgacgttttcgagtcttgagaaatggctgatttgctgtcatcatcgatgaggggtttggaccctgtcgtctccttgggagcaggcgcgccgcctgccgtctctttctcggacaaagagggttgctcctccgccttggtcacgccagcctcactcggtttcgtcttggtcacttcctcctccaagacctttttcggccggggcggaacttcgagagttggcggtggtctcaaagcggcgtcttcgacttgctgaggtctgtccccatgggcgcccggggaggcaggtcggggcagtgagaggtcgaatgcgagcttgttgggaagagggttcaatgccgccgaagacgtcaggtaagaaatctcttgcagacatctgatcggacgtgacgaggcgagttgaacatcatggcatgcggagaacgataagatgatgtcgacggctcactgtttcagataatctcggcttcgcgctcgactgtttccatcccgactaggtgcactcaacgctgccttccaaggtccactggtagcagcgttccaggttcccccacccgtggaatccgatttggtgggctttccgtttggtaaatctgttcgtcgcccaattgccatcgcgatcaatcgtagcacgagccggcaatgtacagctctgcagactcacgaccaccggcgctcttggggctctcaccacccccgctcccgccgctcccacctgcctctttttccttttcatgcgacaccttttcttcggtgatgagcgaagtcaatttggcgtgagccagggtgttttggttccccaacgtcgagccggaagcggaagacaaggtctttgatctgataaaggggggttgtcccatcaagagcgtcgacagaaggatacgaaagggaggacgagtatgaaggtaatgtcagtccggatcgttcatttccgagccagttatatgcggatcgaacaaggtcggatgaggaatttcactgaccgttcttgacggagagcaaactcgagcatcttgacgcgtctcatcatgtccgtcttgaggttctcggccgaccgtcgttcaccttccaatagcgctatccgagcctgaaacgcggcgacgtagggaaatggaatccaaggagatcagaagagctcgaacctagggtgatatcatgacattgtcatcgagggacgaggaggaatctcagactcacccgcatctctgcccgttcgatctcccactcgttcctatcccgttcccagcgtctccattcactctgcaggtaatgcagaacgctcgcgaggttcatgggcgggttctgtgatccgttctgactggatccatcccccgggttcgaggcgatggggatgggattcccattctgatcgaccgcttgaggttggggtggttgctgctgttgttgttgctggtgctgcacggattgtccttgctgactctgcaattgctgcatctgctgctgctgttgctgttgatgcatctgttgttgttgttgttgttgctgctgctgctgtgcattatagccgtactgcatgttttgctgctgtgggctctggttatcctcgtctattcgacgaggagcctgatgatgtcctcgccagacgttgttctgcattatttaatctctcgaaaagggtcgtcgtgccgtgtctcgtctttatagcatgtcctctatgtatgagcgatcacgatggagagtcttgaaagtctaggtgtagtttgattctgggatagccgagttcaacctgcctggctgaggatgcgaggtcgagggaatgtcgaatccgagagatatggattggatcttgaatgcatatgggtgctgtcgtcaggcaagctccatcatcagtaggagcgagagagccagggagccagggagggaaggacaaggcaagggaggaagggagggggcagagaggcggagagtgtgagggagcagggtacgcgcggaaggagactagctttcgactggactgatcccgagccgttcaaaccaggctcactttactcgaatttcaagtgctcagaggtgcttctcatcatgatcgagaccgaaccacctggccccatctcactcactgacgaaagctgatagagcatatcaaatctagttgtgaagccttgacgtctgcttgatcacgccggactcggtctcatgcggtgatcctcggtgtacaaacctctcgaggaatctcattccgaactctttcaacatggtcgaagccaactcgacctacatctcgccttatccccaacaatggctcttctcgcccgcacacctacatgtgaccccgagcagcgaggataacacgatcccgctcgagatcgaactcgaagatcgaagacgaggggtagatctgatcagacggttatgcgaacgcctgcccgagctcgacccgagtcgacagccagaggtcagggcgatgcagccgtcctggagcgcatctgatgcgagacactgggcgttcacccatgcagagtatcagtcgatgtgagtgtgggcgaccagtatagtttgtcgtgtcgtctcacctgctgacaggcgcatgcaatcacctgtccaggcctcatgcgtcgcatgttcagtacgcagcatcgacatatctgcatcgattctacatgcggttcgcactccaggattttccaatcaaggtcagtccatcagccttcttccttgggtgatcgaattcagattgacccggcaatatggacatgaatagatcatcgctccgacgtgcttgtacctggccttgaagacggaagagatgaccaagatcaaggtccgcacggtatcccaagcgatgaagatcgaactcggtaccgaacgactggcaagtccgaccaccacgcccgttcatacctcgtccacgctgaccgccgaaccggtccttcgtttggtgattctaggagagcaaagtatataccggggaattggtcaccaacgaggaatacctactcgaagcgctctgttacgatctcgccgtcgaacaccctcaagccatcttgatccagggtcaccgggcgctccaacaagcaaggaggaggaccgcggcgaggaacatcgtcgggagcacgccgacgggttcgaccgagggggatcgcaccccagcttcagggttaggggtgggaggcaagacccccggatcgactttgggaggcaagacgcccggatcggccttggggagcgtggtggatatggatatggattcgcccttgccccgacatgcgagtttcatcggggacaagccgttgaacggaggatccagggaagaaggccagctggatgacaatgcgccgttaagcgaggacgaggcggaggaggtcttgttggacctggccaccgagatcttgatggccacgtgagtcgccttgcgcgacaatacgaaatttcctcggtgatgctgaccttcagtctgtcgaatcttgtatctcgtagcatcactacacctttgaccgtcctttcgaaaccttacgtcatcgctgcatcggcatacatcctggcgatcagcatgatgaaagaacagacgattcacgattcactaagaggactcgactcgagcgcctggagcgatgcgtttttaccgcaagatgggatcaaaccctcccgaggtcgggaggatcagatggaggtggatatccgaggtgagcatgttgacggccttgtaccgtacgctcgacgcgattgctgatccgaagaatcttccccgcaactaatgtagattgctgtgcgatgatcctggaattccatcggagagggttgatacagaaagaggtcctggacaaggacatggacgttgtgagtagccttgaacttctatcaggctaggtacggtcaccgacgtctactgcatcgcaggctcccaattacatgcagcaggatgagaccgcaaatggaaagacaggcgacttggaccaagctccagtgcctatcatcaaggaagagatacgcagcgtccacggtggccggcacgagaacgatgcgtcaacagaaacacaagatagcgaaccagtagacaccaagacgaacgtggccccagtggaacccgctccgcttgtagtcaaggaagatggtactgctccgcctccctgattagaatgacatgaccagaaacccgttgtatagatgcgaaagacagagatatactgtagtcctacatgtcacttcataccatacaaccgttgttgcgtgcctgttcgtgtgcgacctaacttttcgcctagttgcgactttacgacccctatcatgaccgacctttcgtcatcatcttcgtggttgattgattttctacgcgaatttgatgggattgccgccgatcgaacctggtcatggaatgctcggatcggtcaaggacggccacctctgcctctcagcactcgctcgatcctaatgctgcctttacgaagactgatggtcgtttatcgactccgtctacaaccttggccagcgaatgcagtccccacccgagatagcttgccaccacaaacgagcactcctctttaaaacagcttgatcattcgtcagtggtcagagaacaggcgccgacgaccaagatttggtagaactccacgccaggattcgaactctgctgttgctcggctgagaatcctgtcatttggatcgtgcgaaatgtcgctcaaccatgattacgcaccgtactaccatcatcactatggtcacattacgcacaataaccaccaccctgacttccttgcatgtgacccccctgcacccgcccatcatgcgagaacttcaaggcgaaaagggagaccacctactgagaagggattgccgcctcttgtaagcaagaaggcatcgaagtacactgtgagtcatctcgaccgcgactgtaccaagatacctggcggagatacagcgacttactgtttgttgtcctgctggcaacgtgatcattagagagctcaaaaagtttctcctccttctacgaggcgctcgcccttagatgacggcgcagtgaagcgtcgtgttagtaaggcaaagctcaaggatgtcaagatgcgcaacttggagaccgctctcctacacaagagcctggatgtcctcgagtaagtcatcatcgacatcagcttgtttcgattggaatgcgccctcaccaacgcctgtcggatgcatctctcctcgcagcggcaagaatccctctgagcgacagaagcgttatatggaggcggaatgtgtaaagatcgggctcaaaccagcgagagctaaatggacagtgagttcacgaggaccttgatcgaggctgggggtctcatctcggagtattggacagaggtggttcaataaggagcgcgagttgaagaatcagagtcggcggtcatcaagtctcaaagacgatgatctgtccgagaaggactacaaatggttgaaaagatttgttgtcctgaaagagattggtagtccgatggcggagggagaaggtgagtcccctcttgattctctccaaaacgccaacccattcgacaatgatgtttcacgttgtacatgcgcagacatggacattctcgacagctcgacattcaagcttgatgattgggagccagagatccgctcagagagtccctacgccgtgttctgttacgtggttccgtccaaaaggaagatagtttgccgatggaccgaggatgggtgaggcgtgtgaatgacccgtttttcttccagggcggtgatcctaatcactacactttcactgacgccgacgcgtttcagattatataagcgttgtgtcatcctcgccggtcacgttatcgcccaacttaatccctcgaatagcggcttcaaccttgtcagcgagacggacgctcctggcgacaactttcagcaactcgttctcggccgccatcctgcctatcaaacatgggcgcctagtatggatgagcacggagacatcgactggcagtgggatgactccccttcgatcatcggcatgggagatgtacctagaatcacattcaaaggaggtagcacggtgggtatctgcacaatagtgggggcttccaatatactcaatagatatatgcggtattatagctggcgatgggacttgacatagtacttcaagctcataaactagaacacttgcggcttgatggcgcttgtccgcgatgtcctccggcggattcaattcctataccctctcccagcctgacgcctactcaacgtaatctctcagctcattatggaaacatgtcgccgaatacgttctggacactcgtcaatacaatagacaacattgaacgcgacaagctagtctccgcgttgtcgagcgggaatgaaggcgacggcgaggcgtcgacggcgcgtaagactatctcgaacgatggcacaggtctcatcacaatgccacctacaccccaaagtacgtgcccggtcgaacttcaacggaacatattcgaccgcatgaaaccaaacaatgagctgggtcaggccatactcgatcgctggaccggtgatgttgcagcaacggtcgttcggcaagctagtcactgtatggtgcggaatttccagcccacagtaccgcagcatatggacgacatcttcggtatcgtcaatcttgctcaagtccttccgccgacagaggctgcggttttcggtctggcccacatcgaagaaggggaagatttcttcagcggattcgaagctcaatttatggatcaggatttgattgcgtgcaaagacacggagcaagcgccaatgattgagcctgataccagctgggactcgttggacctgataccggagctggttgtcgatcgaaggaccagcctgagtaccgcacagtctctacccctcatcacaccatcccaaagtctcgaggtcctgcatcaattggacctcatttgctccgctctcccgcaacaacaggcgtccgaccccagcttcatgtccaccgagaccgaagaggacgaggcgattcagctgcttctgggcctccaggatctcgagaaccatttccaagctccgagcttgttttcgctagaagcttcagaggaggcgacgggctttgagtgtgacccgactagactcgaatcgatccataacctcaactgcctcggcatcgctctgcaaaaccaagacatcgccggcacggaagccgaaactcagcaaatgttgatctccagatacgaacccgacgagacggactgaaactccatgcgagacggcgacgaggctaagtgacgagcatgtaatctgaacccgacccttttggagccggttgccgggcacggcctggtcagcggttccttggcgatcctcgcttggcagcccgaacaggtgtaaagaggagcgtgtgatgccagcgagtgccgagggtgtgacaagcgacgtccacgacgagtctacgcaccgaattcgtcatcgatggcgggtcgaacacatcccagctagtcggagtatatagacaacccgcagttccgcagacacatcgatcggctctttcgccgtcactggcttttgtcaacccaagaataccatcttatcgtcgttgacgtatccatacaccgtcccatcgagataatctgataattaatagctgcgaaccgccactcagaccttttacacaaacaacctacctttacccttgaaccttacacagacaatatgggccttgctgcgaaactaggtgcgcaagcccaacccggtgctgcccaaggcatggcgtacggtggcactagcaatactaacgcctatccatctaatcatcaacgatcatcttcttaccctcaacaacctcaatccggttatccttcggcgtaccctccgcaaccgcccgtcgcttctcggccgttgcctcaacaaccgggtggatatggtggttatccatcgccttctcaacaacaatatggctctccacaaatgcaatcatcggcttacggatcgccccatccgcaatcggcgtacccacaacctcctttacaatatggccaacaacaacaaccgtactctgcaccaccataccaatccatatatccagctgctgctcaagccgcacaggctggtgctggaggtgctcctggtggcgcccccgctggtgctcctcccggtggagctcctggcgggtgagtcgatgatatagcattcgtctgtttccgcgtttcgatctgacatcgagtctgattgcgtttttagatacgctcctcccggcggcccccctcccggtgccaacgcacagacccgtcctcagagcggccaattcgctgctccttcggggcctcctcctggctactctggtggagctcctcaacagcaacaatacggccagccgcctcagcaacagcagtacggacagcctccccaaggtcaacagtacggacaacctccccagcagcaacagtatggtcagcctccccagggacagcaatacgggcagcctcaacagcagcagcaatacggacagccccaacagcagcagcagtacggccagcctccccagcagcagcaacagcgcccgcctcctcctgctggaggagctggtggcggcaacacccgcaatgccgggttcatcaagaccgtcttggaacaggctgttgccgacgtaggccgtcttccagcttcaaatcgtatctcatacgagtatgactgactcttaatttacttgcagcaaaaactgcaaggcttctaccctcccggttcgggcgctttggacatgatcgccgcccaagtggcgtcctccggagctctcgacaaggtcgctcaagaatggaggatccccaccgaattggcaaccgacctggtcaaaatcagtctttatgatacggtcctttacgtcgatggtgagccgagtcgcccatctcgctgtgaaggcggaagactgactgataccgtcgggtgtgcttcgtatacagactcgggttcaatggcgttcgaggagaacggagaacggatcgatgacctcaaggccctgatgagcaaggtcgcctacgccacctccttgttcgaccaagacggaatctccgtccgtttcatgaactctcgagtcaatgtgagcataccctcgggcgagatcgaatctcaaacagagacatcagctaacgccgacttgtgaatagggagacggtatcaactcggaacaggctgccctaaacctcgtatcgcagatcaagttctccggtaagcctcgtcatctcgagctcccgcattgaaagtctatctgagtcttccctctgcctcgtttcaaccttccaggtcttacccctctgggaactgctctcgaccagaagatcatccaacccatgctcatgggacccgtccgaaacaactctttgcagaagcctctcctgatcatcgccatcgtacgtctactccataattctcagaacgtggaaaatgctcgattttcttacacatttgggcgactatcacagaccgacggcactcctgcgggcgagcctaaagagaagatttacgacgtcatcatgaggactaaccaagagcttcaacggaccagggtgagtctacgttaatcaagtacgtgcgcaagttgatacacggattaatttcttgccatttcccttgctcccctctctatttctctttctctcttttcttttctaacagtacggacccggagccgttgcccttcagttcgcccaagtcggaaacgactcaaaggccgaagcctttttgagcgagctcgacaatcacccggttatcggtcagtcgagagatgccagcacgtctctccccatcgccttatcataatcttatgctttggtctacttaacaggtcctctgatcgatcagactggaggatacgaggctgaaagtgcccaaatgatgaaccttgccggaattggcgagtcacatgcggttatcgaagggtttaaggacgacaagctaacctcgaacgtatgcgtttgcgtttgcgactacgattcacacgaacagaattggacccttcaacctacctcatcaagctcctcctcggtcctatagacagcagctacgatactaagggtgagtgtctgaagtgttttccggggacaaggaaaggtctgttactgagtatgcataaccttcgccgctacagatgagaaataagcgcacgtttctcacgatttgtgttcgaagatacccgttcgatttgattttgcacagtaattcgaaaacccgttggaaataaagttacctatattcgatcaagattgtctaagatgatatgccatgaaatacaagaagtccaagctcctcgttgagggtacagagttccgatttatagaacccagaaatattgggttttgtgtccacataccgcttcgcaataccataccaccatgaacaccctgcagggccagagtcccaaccagagacaaccgttgtgtctgtgcagccttcaacagttccggtgggcttccccagggtgctgtccagccgatcgatggatgtacaccagtacgatattcccctgtgcatgatggagtgcgttggacggtcaagactccgatgaaattcgtctcaaaaccaagcctgaacctcccattgtccccgctgttggggattgcgataagttacgccaaaatcaggtatctatcttcagcctgaaacttgcaaagttcgtcataagcttccgaagacatcgaccggaagcaaatcgataggaacgagctcgacctaggtcacagatctctaccgtgtcactgtctatgcatggcctgttcatctgcttgacatgcgccaccagatcatcaaagtagaatagttgggtgtgcaggtacttctgggaaacaatgactagtaccgcccccgaagcactgcttagccggccgttaccgagcgaactcaggttcgtttatcagtcgctttcgtccgatgggcaataccgatctctgatgtcaccaatctcaatcccgcagagcttcatggatatccctcttcagccatcctgaaatcaccgttcaagacctgcaggatcaggccaatctgcgtagcggactcggtcaggaagaggatgatctcggcggcgtgaccttgcggagcgtctactggcgcatctatctcggaacgttaccccttgaaacactgcaatcaggctcaagtataccgcttcacagtcacctgcagtctgagaggagaaactatgacaagaaacgggagaaatggttgaaagcaccggatggacgatgggcgtctgactgttcggtgccagaggacggcagtttgacccaaaaggcgagctcgagggagagcggggttgctacgtgggatccattaaatctgggcgaggaggtgagttaatttgagggtttaatccaatcgattacatgtgctcacttcgcatctatccgtctcgccgtagaacccttggcaagcatggttccagaacgcggagctgagaaagacgatcgaaaaggatgtcgagcggacgtgagtcccggtaaagatgctcagcggtccagtatcctgacgaactctcggcccgatcatgctagtttcccagatatggactatttttcggacccttcggtgcggaaggtcttgacaaccatcttattcctgtgggcgatcgagcatggggacgtaggatatcgacaggtacggcttgtcgatggctttttgtcgtacgcttcggctaaacagtctcgatatgtgatgatagggcatgcatgagctcctcgcgacaatgcttatggtggtcgatcgcgattccctgctgtccaagtccgatacctcgactctcactgcgacgtcgcccttgcaagaagggtacatctcgacgatatccagactcgaggaaagcatggcgctcgtactggatagaaacttcgtgcagcacgacacatatgcactcttctgtcgtatgatggagactgggattgattggtacgaatggcggaccgaatcgattggggccgtgagtcgccaagacggattggatcaagctgaacaggaacggaacataacatttcctctcatttcagtcaaccttgcaacgaagagcaaagatcatagactattgcgagtacatgcaagacgatctgatgaagcgtgtggatcctatcctgcatgccaagttttcggccgagggcatcgaaggccagctttggggcatgtaggtcccgaaggcacctttgggaaaggtcccgaagccatactgatggacgatctactcgacgaatagtcgatatgtccgcttgctttttacgagggagatgccctttagattggcgttgcggatatgggatggtctgttcgcatctggaggaagggtagacgagcttgtcagctacgtctgcgttgctttattgctgcggatacgacatctatgtcagtatactcgggttggcaatgaagtgctgtactttactgacgaagacattgctccatcttgcagtattaccgtgcgactacaccggcgtcttgacgatgctgctgaagtaccctcctcacagtaccgagctgcctctggacccggcacttctcttgcaacaagcgagagccatcagggaaaacccctcgccgtctaccggtgcagccatcaccctgcaaaaccaggagtctttgggaattccagcatacgagccggacggtaccgaaagcaccccgtcagtgtctcaccacgaaacgctcagaagtcgtcagaggtcggtaccgtcgtcgaacgtcccccgtagcatcggggtcacacctcggggctatggcttcgagtcgctggcacgaggctttatggaacgggctcaagcgtcaggtatcgacaagacgattttgtcgactgtgtcggaactccggaaaaacttgccagatttcaacccgcctgctgcaccgaccttcccattcaggacattttcccctgatacgtctgtcgatgtgctgtatgacagcgacatgccgtcgtcggagcaggcctatccaagtccaccccccaggactctgctcgatgcagaacgtgagattgccgagttgaggctggttatgatcgggatgggcaaagctatgggatcctggatggacgtcgtccatccgccaaacgggccgaaatcggaagcggcacctgacgctacgggtcaagcatggacaggcatgcataggctacaagagtcgctgctggacggtggagccgcttccactagcgacctggcgaaggtttgggcgtggtcgcaggatctccattcgatcagtacaccagcgtcaaacctcgttgagagcgggtatccgcgtagccccacgctctcaagtactggatctaatgctatcgctcggtcgcctgtgctgtcgacacatgctacgtttggcgtattgtcgccatctttggcaagttcaggcaatttcaatgcacccagacattttgccgcggaaacaagattgtctttgaattccccacgcaacctgaacggattcggatcaccaaaggcggcctcgttctctccaacattacaccaacctggccaacgggattcttcaacctcgtcgggaccgatctcgacgtctaccgaacacgggcgaagtacaaatcacctgatgccaaacccactggatgcaccatttgagatgccgaaatcggcgcatcatacagaggatattagtctgcaaccgtccaaaaagacatctgttgatccgctccttggtatgggcgtctagcgatcgacagttccacgtcaattcgttgtatcaagcgctctaccttgtacaatatacaaggctacctattgtatgacggcatctatctgcaaatcgcgactggcggcctaatctagaaagcccaggctcttccgttcttacgggaatcactggcgccggtcaaagtaccattttcgtgtcgcacaacagcttgaacctcggccactccctgtcagatttgacaacaaacaggtcagaacgagtcgctcgggttgctcgggaaaacaagatagaagggatgcaacgactgaccaagttgatatcaaacatcgtcacgttatgcccacgttctttcagcgcgtcgacgaattcgctctcgaaagctatagtaaaaaacgcatgttagcggaagtgtcctgcttggaccaggacgtatcgcatcggctacttgcctgtctcgagcgtgacactggctgggaacagctgatcgtgcaatctaggtgcttcgatcgccgtcatcacgtccatgccccattccatgttcatcaagacttgcgcgacggctccaaagatcctgctcccgccggaacctccgatagcagtgtaaagcgtgccgtcggaacgttcaatgatggtggcagaagtcgaagataggggtctcttgcccggctcgggatagttgaacggagaaggtttcagcccaaaagcgttgatcttgcctggggtagaaaagtcgtccatctcgtcattcatgatgatccccgtagagcgatccataacacgggaaccaaagatcaggttgactctgagatggaacaagcagagccgtcaggtgaagtgcgaaccgctgaggagtcgagccaactcacgtggaagtcaacgacactgcgccgccccactggtcggcgaccgacatgtgagtggtccccgagtctgtcagcacgtcgaacacagggtggtagtattcggcagtatgcgtagtgttctatttgcaaagatgttcagcctgttggctccttgaatctcaccaataggagactcacatcggtcaactcttttgtgatccggtcggcccactcgcgctgagcgaacccggtcacccgttctcgcctcttctcgtccatgaacggcgtgtcggggtcgctgatctcggtcctcgccccgaaagcaaacttcatggcctcggttatgcgatgtatattgagtccggtcctggtcttggtgaggggagaatgcgggcgatgctggtcgtaaagctcaaagtgctccatgatgttgaacatgcccaacatgacgggacctgcggggaaccgcgaaaagaaacacaaatcagctcgattgcaaaagcctctggatggcgctccctcgcggcgtgctcaccacagctcggcgcatcggtcgtccagatggtcttgccgtggtacgtcgtcttcatgggttcatacaccctgaccttgtacgccttgaggtcgtcccgggtcatgacaccgccgctctttcgaacggtctcgacgatatccttggcgatccaagcgtgctcgttgctctcgtcgtccttgccatcctctcgtccgtaaaagaccgaaggcccgtacttggcgaccgaggcgagggatctcgagtagttgtgtcgggacatgtagtcaccctcgaccaacatctctttgcgaggcctgaagacgtcttcccactcgtctttaccttccatgaagcctacgagccggacgaactgacgatgagccggaccgagctttgtatcgtctgctcgcagagtacactccccgcccgccttcagactcactgccgtagatcctgaacctccttgcgagctctcgagataccctccagcctctagccagcttgaccacgggctcgacgaggtctttccactcgatcttcccactcccgtacatctcgaatgccgtatacaaacctctcaactctccgggcacgccgacggacaaccctccgacctgggatgacccagcgggggccttgacgtacatctgcgggtccgagagtgcaggagcggtctccctgaaatcgatagcgatgagggtcgacgtctcccccgcagcgtcccgggtcgaggtaaagttgacgagaaacggcgaatcggcgggttggaggtacgtaggggtgtcactccatggatccgaggttgacgagactgtccggggtggagcacggataaccatgaatccgccgcctccgagcccggacgagaaagagttgagggtcccaatacagagacaagtggtgatcgccgcatcctacgggaagaggtggatcgataagcgtctagtcggctggtgtcttttcctcgctctaacgtgtggacttacgacggcgtttcctccggccttgaggatgtcgactcccatcttgctacacgtctcgtcttcactcgctacgacgcccttttctccctcggtccagaacgcatcgttcctcggcacgtcggtcggaggaggtagtttgaaaggacccttgatcgggatcggtacgtgttgaggtccatccccatgactccccggtgggttcgtcgtcggcgtgtcgtccgaccggtcgtggatccagggaatatggaacgtgtgggtgaacaggaggaagacgaacgtgagggggatgatgatcaaggtgatggcgatgcacaatcggcgctgttgttccctctcggtcctagcagacccacgtcgggtgtcgaggaaaatgttctcgttcgagtctctcctctttttcccattagccctcgtgccacctcttgcgaaactgggcaagagggatccctttcgactcgatcgaccggctgcctcgaggtcgcgcgtggccgagcgggataacaaggtatccctctcttccgtccccgcgttgggttccctctcaccctcggcatctctacggaacgaattcgtcctctgcatctcgatcgcttgtccttctcccggtgtactggcggaacgcaggtagggcgaagcggacagctggccgttgttgttgacgggagggatgggcgacgaggtggccgagagttgaaagttcgaagcgttcacgaacgatgcgggattccttcgaagtagaggaatggtgggcgacgaatggcccttgccggcgacgttgagcgggtacgagagcacaaaggaatgagtcttgtttttatgtctcggtggtgatgagatctacgagtcgatactaggtatggatgagtatatttgaatgaccagtactgcccgccggctctggtcgactcttctttgtcgtcctcgcgtttttatgctttgtcatctcgtttcaatcgcgattaaacaaaatcaagtagcctcacgacaatgacatgtcccgtcctgaaacacgacgggcatagacatccaaacatcacacatacatttagaatatgtatatatatcaaagacatatcgaaagaagctatagacacggtcttaaaactaggtagctaactaaattagattaaagtccgagctagatgtacctatcgaagtgacctacatacccgtcgaccgttatataacactactcgtcaactaccgttctaaaaagtaaagcgaagataaagaaaagagagagggagaaagagagagggagtacccggatcaggtcggtcgacaaggacccgtcgacctttcacccggtaaaacgtccctctctcctatatacgagaaccgctacgtggccacccgcttctcacctcgaccgaacgaagaggcttaccgagaaggatttccccagagatcgtccgtcccccccgctggatgtcgtcgtcaccccgttgagcgtcaactatctagtctatagaagggctagctagtgatctactctaaggctatgtactcgactatcgtacggctatagatctcgtcgttaaggcgggtggttgtctacttggctactactcgagtggaaaagagggggctggagggaagaaatacggcaaggaattataggaagagcgaacgactagaagaaagggaaacagaaacgaatcgtaaaaggtatgaagcactgaaaaagacccctcgcatcgcttcagcttttcagttccagttccgacccctctgattcgcacgagatggcactcaccacctgaaaagccccaacacggaccgacctgacctgagctgcgcctagagcaaggcctggtaagcccaagcaccgagggctccaccgacaaacatgacggcgcccatgacagcgcctcgtctcctggcttgttcgggctggacgatcctcccgttcctcctcctgacgacccgttcggcggtgctcccggggaggatgacggtcgatccgacaatctcggtcgattcgtcctcggcctgctgatcggcggtacgtttgatccctcgggcggcggcggcggcggacaacgagctcgaggaagcgacgggagcttcattagaagcggcagcggcggcggcgtcgacgagggtcgtagtcgaggttcccggtacgagacccatctctgccggggtcaaccctgcggcggctttagcctcggcctcttgtttcaatcgcaggacgtcggccttgctctgtgcgatctgagcttcagcatcgatgatggtgcccgcgggagccctgacctctcgggtggattccagggtcagaccgatcgtctcgccctgaccctcaccctcgagctgtacaggctcggtggaagcagtctcggtggcagttgccgcagcggtcgatgggcttccacgagcttcggcagtcccagctcgggtccttcgagcacgcttgggagtaggctcggccgtgccccgggcgggaaggtgcatctcgggggtggtcccactcctcgtcctgctcgagacggcctggttcgaggtggtagcaggaggagccgcagtggtcgtagcgttgggagtcgagggcgcggccacctgagatgcggcttcaggcttgacgctcggactcgctcgttcttcctgtttcttggcggcttgttcgtacgcctgttgagaccgttgagatttcctgtaggcgactccctcgaccggggcagcacggaccatggcctgagcgaaagatgacgtcgttgttcgggatcagcaagacggactcgaccgatcatgccctcgtcttgctactcacgttgatccattctcccatcctgtaagcaccggccaaactggtcgccgtcgcgggtgggatccaatgcccggccaacttgaccgtcgcaccgtccctacttccattcatccccgtcatgtcgaacattgatttgatctgcggcgcatccgtacacagaccccgggatcagcgatcgtcctccgagataatggtatgtctgcgtgctactgtacactggggacgacccccagcggctcggttttactcacccaacgcatctctcgttcttcttcttcctcggtagcaccggggaaagcggccttgaacatggtggtcacgctgatagcacccgtgtcatatcgacggaggatgaacgcgtgttcgttgggggcaggtaggtcctgagaacgttacgggaatcatatcagccaaggtcgtcgtccggtcaggtcccgacggagatgacgggccgaggtcggagatgaggagactcacagtagcgaccttgagacgaccgacgacgatctctttaccatcccgtacgatcgtctggaacttgaccaccagtgcgtcggggtcattgacggtagccgctgaaacgtagtcgaatcgatcggaggacgagcactcgtcagcgtccggcgttgcaaaaagtgatggcaagggcgaggcgtaggggtgacgaagggtcactcacggtactgcaactgcgggttcctcaccctgacagggagttccggtcggttgccttgagcaggagcggtggcgatggcggtgtaggcgggtgggggagggatgtcgtccatctgggcttcgggaacgacggcgacgtttcgggagaccatgtttgctgatgtcgaggcggtgtgggttgccgaggtgaggttgggcaggcgagtagaggtttgtatgaatggaagagaggacgatcaaaactgttgtgaatgaatgatgtcgaggtcgagctagagttgatgatgatgatgatgcgttgatgttgtcgatgttgatgcgttgatgatgatggtgatgtctccaagctctaggtcgacgccctccctcccttgcctttgatcgttggttctttcatctcgcgtttgtcgtgtctctctttcccttttgtcccgccatcacccatgcaggccatcaaacggcagcgtcaaaagggaaaggggggcgacgaggcagccgctcggaaccgatgtcaaaggacacgttgattaggtaatcggctttcgacagacaagcgcgtaggcgttgcgcgcttcgacctatcctccctccagctgatcgagtcaaacgctatgctatgctatgcaacgatgctacactactaaatgagatacaacctcgccgctcgtctaccactaccaacactactaatactgtatacaacctgcaagccaaacgtctcggatcgatccccgcgtaaacacctctcgtcgagtcgctagacggcaatcttcctatccgtcccgtgtatccgatccgggatcgagatacccacggcgggtcctgccaagtcgagcttgcccgcggcgttgtgtttctgcgagacgtcgagaggaggtggtggtagtggtattacccatcgtacacacggtcagagattgagagggtggggggggggatcctgttcgggatggtcaaacaagggtcgactcacgtaggcgtccttgccgagcccgtgatccagaccttcgagcagggcgcatgctttctataaagaggaatcacagggggacgtccaggtcggtaggatcagccttacgtccaccgtaaacatcacacccgcgtacgacgacttcgaggagaaactcacgcaaaggtcgttcgagcttatatacccgcacctcagacaattctctgtacacatcacccaccccccccgcaaacgcaatcgagatcccgtcgacatgatcagctttgttattgaccctggcccagcttgaccgccgagacggcgaggactccgactccgactcacgcatccccttcatccctccccgaacttctttgcccagttcaaaagtctcgcccgaatgaataatgtccacaatggccgacggacgaatcgcttcgaggtctttgaggaagactcgggcgtgacctcgataggctatgagcgtgggcgcagtgacaaggaacgacaccagggcgagacgaagtgggaaggcgtcagcgcacgaggatctcgacgaggagaaagcgggtgggatctcgacgggcctggactcaccgtccgggctgtaaatacactcggtggaaaagtaggtcaactttttaaagtaggcgtacctgtacaccaaccatccagtccgccaggaatcagctcagaggacggggaggaacccattgggctcgaaaaggcgacctacatgacgatctccttttcataagcgtacttgaacggcttggaccgtttgatcgtatcctctgattcggtgaccaaggatgtacacctggcgagcctggcgatatctccgcgcatgactataagacggggcgcagggagggggggtcgagatcagtcaaacatgcgtgaccggacgacaaagcgattcccgtcgagcttcatctcccctcgcgatccactcactgttcatcaaaacggtctctgcgatatcatccgcgttatgtcccgtgacgatatgtcccactcccaacccctctgcacccctatccagagcctgcctcctgaagacgccgcaaaacgtgcaattgttcttcctccccaccttgccgacgatctcgtccatcgtgtacccatacaggtcccggtaagagaggatcgtcaggggtaaagcgtattcttgagagttttgagcgacggtgaggagggaatcgtctcggtacccagagataccttcgtcgatcgagaggagggtcaggtcgagtccgtacgagtagcgttcgttcagcgttgtcatgacgtgcgcgaggacggtcgagtctgttcgtcgggtgccagtatcgccaatatgggaaatggtcgtcgtttgccgtcatcgtcgggtattcgacgagacgagaccaggcgaggcgaaagttgtacgtggagacatggcaagatctgttgagctacccgcttcttacgaccacgaacccgctttctcaggtctacgcaccttttcctccactggcgccgattgccaccttgtcacccggcttgaagatccctccattctcggtgatggtatgatgcacctctgtctcgaacacttcaaagaagcagggtttgcacacctgttgccccgtcttgggtcgacggatgagggctttgttggtccggcagagttggcagagtcggggaggcatattgggcgttcgcgagtgtcggtcggtgtggcgattcttgagcgagggtggtgatcaagttgcaagttgattgcctattcgataagccgtgcatgaacttttgacctgaaccgactttcgctcaaggccgaggcaaagatagtttgagcgaggccgagggtaacgttcggcatatatctcgtggtcaatactcgaatgaatgacgtgttatttgaatatttcatttggctatttaattgataacaccttgatgacctaggttcccctttctcttcttgccccgctcgcgtccggtgacgaatctctatgggaaagaacgaaatctccgcagcaacgcacgagtacctccctcacttggttacttgttcaaagtcgactgcgatcactactactactactactacactctcatacatatcaccgacattatcaaaccaaaatcatcgattcgggcaatcatatttctacgtcgtcaaactttgctcatcctgaccgatcgcatatcccaaacacacctcccatcgtaaagcccgatttagcacacacacacacacgcacacccctcttcgatcaacatgtccgactacccaggcgcacgaagacatcaccaaggaccccattatggtggaccgcccggtggtggtggcggttacgaagctccggtggcttatgggggagcaccgggaggttactcgcaagtcgcgctcagcctcttttgaggaagcggaccatgtaggctgaatcgatttatcgggacgggcgttttcccgttaaacaggcaagcaccgacgtatgggggtcaaccgtcgtacgggtacgtcttacagggtctcgtcaaattccgcaacgaggtcgttttcgagctgaaggaggcttctcccccgcttttcgtgtttgtttagtcattcggctccacctccaggtcctcctccaggtggctacggaggatatcaacaacccaggtaaaccttccaatcccgtcttccgcaccgggagtacaaagctgaccgcctgataacccgtccccgtattcgaccttcttcttgtcaaccccattgttccggggtgatcgacgacagttacggcgctcccccacccggccctccgcctcagcagtatcaccaccagcgtcaagatctggcgtacaacaacgcaccgacgtatggcgcgcctgctccatcctatggtggtggaggtggcgggtacgagaggaaccacggtggcggcggtggtggtggtggtgatggctggcaacctccagcgggacaggggattcctagtcattatgccgtcgggtgagtttcatcctcgtccacgcgcgcttcgattcgactcgatctggccgggtcgaagcatgctcgtggtcgggaacgaatgactgatcctggattgacgaggcaggtcgtccgggtttgatccgagccagcatcatgttcggccccatggacctcctccgggtgcgcccgcaccatgtgagttgaaacgtgtctttccagtcgagaatatcacggacactattcaccgtcacccctgcccccattcttttcagaccggcctcctcagggtgatcagttctacggcccgcagtttcaaaacggtgggcaggccggcgggaaacaacaaccctatttccaatactcgcagtgtaacggcaagaggaaagcgctcgccatcgggtgcaactatatcggcacctctcaagcgctcgcagggtgcatcaatgacgcgcacaacatggtcaagttcctgtgtgatcggtttgggtatcaacaggaggacgttgtcgtcctgaccgacgatgcgaggaatccgagacagatcccgaccagggagaatatgatcgccgcgatgaggtggttggtcaacggggcgaggccgaacgattcgctgttcttccactagtgagtgtaggcaggtggggtgaccatgagcagcaagaggttggctgaagagcgaatcgatcggtcatgtagttccggacatggtggacagactcaggatgtgaatggcgatgaagagtacgtccagctccagcgtggccagttcgcatcaggtttgagtcgaatcgagctgaactctacatcatattgacgtcccgcagagacggtttcgacgaggtcatttaccccctcgaccacaaggttagcgggcacatcgtagacgacgaactgtaagagaattgttcgtggacttgttgaaaggctgaagtgtagttgacgccgatccccatccctttagacacgatttattggtcaaacccctccccgccgggtgcaggttgacggccatctttgatagctgtcattccgcaacgtgagtgccttgggtgctgtgacttgactcgccgtgaaaaattgctgacaaacagacgatacagcgcgctggatctcccctatgtcgtcagtacctcttgataacagcttgaccctctaatcgaaccgttctaaaccggcgtactcgcctttgcaacagtactcgaccgaaggaaagatcaaggagcccaacttgcttgctgacgccggccaaggtctgctcagtgccggcatgtcgtacatgaagggagatgtcggcggaatgttgtccggcgtcatgggattgggtaagaagatcatcaaccagaatagcggcgctgcagacaagatcaaaaagtgagcttggtggaggccagtctgcggctctggaaaacgccgactaacccgttcgtgcgcacctagaactaagacgagcccggccgacgtcgtctcgtggtccggatgcaaggatgatcagaccgtgagcctgcaatgtgggtggttgtgaacgatggttcctagctgaccagccgtgttgcacagagcgccgacacgcaaattgcttctcaggcgactggagcgatgtcatacgtgagtcgtcgtcacaagacagctcatcctcagatcggtcgctcacctcgatcatacgcaggcgttcatcgccgccttgaatcagaatcctcagcaaagttacatgcaactgttgaactctatcagagacgagctcaaagggcgctacagccagaagcctcagttgagtgccagtcacccgatggattgtaacttgttgttcatttgttagagcgtcacatggcgaacgtgtacaacatgacatctcgtatgcttggtaatcgaactcggtggtcgcatcaatgatggctggctaaattctttgagagagttaaaggcttccacaagtggaggtatgcgtgagggagtatcccgttgcagtcgttgcagtcgctggatcgttctggattgttcaagtcatcggcggcggaacactgactctcacaggctcgtactaatgttcgacgcccggaattctagtacgacactcattgtatacggctgataggacctcgaatgttgtatcgaatgatcgtgtatcgtcgagctgttttggctaccgtcgggatcgggaggatcatgtaaaggtgccgtcgcagttgttggatcatccgcagttgctagatcgttcgcagtcactgcatcgtatcaagtcgtcgttgccgagacactcacagacttgtattgggcaaccccacccaacagttggttgcacatcaactcaactaattgctcctctagcaacatctcctccactgttgctgcttgacctgcatcagtacctctgtctaggactggaacatggtactgtgtgtagagtgttgtatgggtataaggagtacccatgtttgaatctgattggactcataggggagagcaagtaagtagatgtagatggaagaaatgtcgttgttgatgatcgtcgtctcccaatcagcacctctttccatgaacgcgtggcatattgacccagattgagccaaggagcggggtacggtatcaatgggtggaactcaattcagcggttcgacttttcagactggtccgaccacaatctatggaagatcgtatacgctaccgagacctgactgtcatgaacaacgcctttcatcatgtctctgtcggagcagtcgagataaacatcctggatagatgcatggtaaacggcgtctggtaggggcgagctttgctgagcgtttgggctatcggtcgggtcagaattccctctcggtctcatggacttccctcacggaaattggggtttgggcgatcgacgcttcccttgcaaagatgccctttcgggcttttcctagacagacatccctggatggtgacgaaaaaggccaaattttctgggcgacctggtgttctcatgatgaattctatccgtaattataatttggaagccaatggcgctcgaggcgtcatttagggtaagcttttctcgaaagtgttccatttcgctgatatcgagagagctggagagcgcgcggcttgacaaccttgttcttctcactgtcactgctttcgaaacatggcatcgtgtttctcttgttcccgttctcaacaaacttgtcttgagtattggaaatgttcttagaggtagtgtactgtccttgatctaggtctacaagatcgtgctgaactgcagcttgtttagcctttttttcgggcttgtccgaagtcagcgcaagtgcttcaaatcggtgtcgaccggcttatctcgtcgtttcgtacaaagttcaatggctctacctttgaatttctgcgcactatgaagtgtaagatctcttggccagacacttctgcttcgctcgagaaagctgtgaatgcatcggcgttgatacttcgggtttcgatggcatccgctaaccccgtcgaccaactcgaactattgattcggagagcattttacttccgaagatccgagttgccggatgttaattccggttctcatccgctcccagcggaatcacgtgatcatgaagaaatatctcccgcgagccgcctcttactttcttcatgttgttgaccatattcacttgatcgacggtttcctgtctttctctcgacaacttcaccaccaaaaccgccaccacacttcagttacagtcatgagagtagaaggttgtttcttttgtcaaaagccccgctacccgggccacggcactcggtatgtcgacgacgcatcgcttgacgaaattcagggctgacagaaataccgacattttcaggtttgttcgaaacgatggcaaaacattcgatttctgcagcgtgagtagcctcgcgacctaacactgaggcttgaaattgactcttccattctctttagtcgaagtgccacaaaaactttaggtgaatagcaactcgtcgaagccgcagtgaaatagcgattgatcggccgaccccactttcaggatgaagcgaaacccccgaaaggtcaagtggaccaaggcgttccgaaaggctgctggaaaggacatgaccatcgtacgtcgtttacttacgcacgcgtacatgttgacgcagggacttggtcgttcgctgacaacgtggactcggcttttgtacaactcgctactatcccgcaggactccacgttcgagttcgagaagcgacgaaacgttcccgtcaggtacaacagggagttggtatcgactaccatcaaggctatgaagcgagttgccgagatcaaagccaggagggagagggctttctggaagaacaggtgcgtagttcaacctgacctttggatgtcgacgtggtggaagcttaccccgctttgaatcgctgccaactcgcaggatgtccggcaacaaggctcgtctcctcacccaccagacctcggaaatctctcgacacctcgagctggtccagccccgaacgacgtccaagacccacctctcggtcgaggacagggccgtcatccgggacaagatccgagtcaacgctgccaagcgtcccggtgttatccagaccaaggctttgaagaagagcgcctttgtgcccgtttcaggtggacagagcatgggcatggacaccgactagacgagcggcgtctgccggcctcaaaacatcttttgggttcatgcgggtttgatcggaggtcgtgtacgggtcgtggctgcgatgcggcgatgaactcggcacggtttcgcggtcgtgtatatcattctatatcccttccttgcaagtctgcctgtacattaatcgcatcttcgtttgtacattcccgatggatatcaactagattacgacctcctttcactttcctgctgccaatttggccttgcactgcacattctccttctccaacttggtcagagtccggacggccttgtccatcttttccaacaggtattccgaccgcagttctgtagcactcagcttgccagcgaaagggattactttagctgtaatcgaactgtcctttactggaccaatctcctttaatcgtaagagttcatcttctatcgatttaatagtcgagtcggctaccgaaatcaagctcgagttgtactcgatttgcgtagaggctgcaaagaccgtgtctgagaaacgtcttggtcagcgcttggtgccatcttcactcggtatcaagctggtgtctaccatttgagagcctttcgaaaacgtgcctataaaggggctttccgggcctgaccatcgatgggcgacctgcaaggataagtgacgagcgtaccttaatatcgattgatccaggattacgatttgcgcgtctactgaccgtcaatgtaggacaccgcgatcatgtcgtgatcttccattgctcttagagccgcttcgttccctttgaaagggggatcttgcagcagagcagcatagggaatctgggaacggctagtcagctaacatagtcaccagtggtttcaggcgaaaggatgcccgtacctcgtgctttgaagccaagtcattgaccaccttccaagcctgagggcgggtccagggcaagttcttggcatcatccgagtcatcgccaaaggcggactttctcagctcaataacgctcctggtgatgatatcgtccacggcttctttgacagcgagaccggagcggactttgtacaccagctatagccagatcaacctcggtctcagcgtcatactctttgaagtaaaggcacaaagccgtctcaccagctcaagatcgatcattcttccgccaatcttctctatctgctcggtttcttccgcactcaaactcgacccggtcgctccaagcttgctgacaacgtaggccatactgttctctcggtcagcatcagccagactgatggtattaagtggcttggccggaagcgctaaaggatcgagtagacctgtgagcacatcttgtcgtctttgcaagttgtccgcagcgtacctttagtgagcgccttcgaggcgctggaagagtcgcatacaacgatcacatgggtgatctgggcaggtgatgtcagattggctactaagagggaatcacttgggtaagctaaccttgttttccacgagtccagcagcccactcggccaggacattccagatctctgctttcgtgtttcccttctgcgtgaagttgtccaacacgaggataggtagcgattcagtgtagtcacgttcagcatcaacctctgaggcctgtttctgcatcattgccgacttggttgcgatcggatctaccaataaaggcgtagtagcaatggaagatggcgtttccacgggctggatggacatcccggtatcgttctcggtcaattcttcttctcccaggcctagttccgacatgacaccgttcccagcaatacagtcaaggcgaccatcgtgccagatcccgcgcttgatacgctcggtcctgtcgaccttggccatcgcttgttcgcggacttcctctgccttgcggatggcgtccttttgagcctctcgtcgactctcggacgtttccttgagggctgagccgacgacttcgagcacttgtttgatctgttgatccagtggagtagcgaagccggctttctgaccgatgagacctacagcagcaagatcgatcaatccggaaatcgagctcataaaagtgaagaccggccaatagcctacggaaaaaacgtcacatcagcttctaaaatcagaatgtggacaagtccactcacctgtctgatcggccaattcgttgatcacggccgcgtcggtcttggcttttgcgatctttgagcagtcgatgaacaatgctttcctaagataccagcttcgatttagcttacgaacaacgacgccatagttcacaactcacttttccttgtcctggatgaccctattgactagactagcttttccgctaccaggaggacccgtgaccgcaataaaagtacctatgcacaaggaaacatgagcctctttaacttcactttggccagatcgcactgccactaacctggactctcgctaatccaactcaagacctgcttctccgccgcgatacgatcctgccaagctccccttcccactccgtcgttggaagctcccgtatccgaagaggaagatccaaacgagaatcctgatggaagcacaaatttcgatctgatccatttgacaaacgagtatccctcgagctcaaagtatccttgcacatgtgcttgaacgaagaagcttcgaatcggatcaaagaactgcgaaatgctcgacttagcatgcttgctgaggcgttcccacactaggctcttaccgtataagatagcgtaccgatgaggaaagctattgccggtattgtcaatcgaggatgtgatgccaaccagtctcggaaagcgtgtgcttttagcggtctttcgtagaagagacgaagtcgagttctggggatcgtgggaggtgccgagccgggtccgcctttagtctttgcatcctgtaccagagtaaagtcgcgtgtgttggtaggagtggaaagaccatgcaacacattgatggcgatggtggaaggagtcaaacggctgtacgcaatttgagcaaatctcaggctgccggccggcacaggagaaggcgggacgatattggacacccgtccgtatggctattgagagggagatacctttagtctcgaaaggcaatgagtcgatagacagggagcgtgtactaaccctaaacagctcatatagtacctcttgtgaaacatccggtccgtcaaactccactcggaggcgagatgatgaataacgatccagatcctccgtcctgtaaggtttcgtcaatgtcaaccgtgatacctcgacgcgccgatacggtcactcaccattgctttcccctgacagcccaacaccgaccatctcccaaagcaaatggcttcttgcccttctcaaatcttatctcgctggaagcatgcgttctccttgaagagttgggtggcacgtccttgtcctcttccaagccttgttcttcctctgtgccttccttttctatctcttcgatcgccgaggcagccaattgagggggaccagggaggaaggtcgaggcgtaccagttgccgagccagttggggaatcctcctaaccgatgagcggctgaggacagcaatggcaggaaggcacgaggagctgagaaggtcgccccttgttcgacaggagggaggtaagagtaattgagaaagaccccgctgtaagcaattcggtcctggtgattagcgaactcaagcggtcgatgtctgtacattccgtatgctggccttacccatctttacgcctatagcaccatcgcagaagactttagccagaaccacgatggcctatgtggatagactcacgagatctccaaattctcgagcttccaatcgtaggctttgacctcgctagcaatcgattcgagttgttcaagcagatgatcttccctcagggacgagacgagcgagcgaaagctagtcggcgcaacgtcagcaatgggtgaaagtgatcgtcgaatcgttacttactcgaagcgaccgagacgaataggcaaaacgttactgatgaagaatacaccttgtcgtcgttgcacctcgcttttctcgccgatatcaaccgcatcgacgacttcggtcgaggcataatttcggcgaccgatgcctagctgttgatgagtcgccgaacctagcagataacgtcggcggaaagctggctggttgaagactctgcctaacatcactataacatcgcttgtatctgggttcaactaagctaataggtcttctcagagacatccgacgacggttgatatcatgtctagtaacctttcagtcagttagccctctcgatgtctctcgaggcaaaaagtaaacaactgacgtcacgtcacatgcacatggcggttggggtagactttatcttctgcatttacaagtccgaaagttcaacctttgttggtctaggtatacaagcattctcgaagacgagacgacctgatttatttatcggttacacaacacgctaaaacccaagaatcgaaccctatctaaaattgtcctcaagactgattgactgaagaaatcgaaaagtaaagcaaggccttcatgggacgattcagccaatcaaaatttgtgaacctcgctgggtttggcaatatcgatgacttcgtcattgcattgtagtgtagcttgttgctgatacctcccggcttcgacgctgtccagatcggtccgtcgcgaaggcgtcttgtgcaggtcatcctcttccccgtcgctagggtcttgaactatgttgagccgtttctcggagctgttgatccggctgttgcggtgggctgacgggtaggactcactgcctgaagaaggaaacgacctggaaacgccttcgtcggactttgtggtttcgggatctgcacgcatgtcaggtcggatttggtcgcgcctgggaatgccgcatggtcagccgtggtttttacgttcgctggatatatcactcacgcaagcagcatttgtagcaagactaaaagcgacaccttgctcaagcagtgcataggaaaatcgtgtatggtctgtcatatgggatgatgagagactggttgcatactactgggatcaaccagactcaccgaacggggaagcgctcctcgcaaaatcaaggagaggatacacgctactgtcggcaataccatcgcatgtacggtgtagaacgcgatcttttcccaagccgtgaccgctctgccaggtcgatccaagcgtcagcttgattccgattccgggtgaaagtctcagatgacttacctggttgtcgatcctttcgctttgttcctcaggacaagggcactcgacgcggtcaaagcaagcccgagaaaggtccccgtagcataacgggcataattccagggcataaggttagccctaaatacttgaaggtcttgtcgatcttgagactgtttattcatttccatcccgtggtcttagcttgtcaatcgcttatcttaccggtcgagcggacataccagtagccgaactcccgtaccgattgatggagcgagtccagcagcgatcaacttgaagaggggcagaccgtaccaccatctcaaatccgaaagctttaggaaatcgcatcacattagtctcgagtgcctttctcgaggtgcccgccttcaaagggctctggtcactcactttaacgaggcgagcagcaaagaacccttgggtcgtcgcatgtatgatgccagtcaagatggcgttgaccccctcggtccacttgatctcgaatacgtatttcatatcggtaaagtgggtgacaccgatctcgaagacctggtacatgtcgatacagctgagaaagataccgaggacaaagcatgcggtgatgacgaatttctccgggagcttggcacgttgttggatgtaggagaacatctgggacgaacgagatgctcagatgtgatgagaatggacaggggtgattccggccccgggactcactagcgacatgacataaccctgaaaaacgagggaggccaaagttcccatgtagtttccgatatagttttccctcgccagcacacgcagctcggcagaagagtagaaaggcttgtttactgatgacatttcagatggagcgaatatgatgttaccagtagacgacgatcaagagggcagaagataacgattgactacatggggccgagtacgaacttgggcgaggatcgtgtccccatccaaggtgtgcagatatatacctacgaatcaattgggttgggttgcttaccaaaggccttccagaagtcgaagtgatcctagagcagtctgatgacatgtaactccaactccttgaaagggcaaatcccgataccgccttccttcggcttcggctcccctcgatcaaactctgtagatcaaaaccgggcggatagcagcgagttcgaggggaaggccgggatagatgatcactatccgatcatccttgatgatctctgatctttcgatgagatggaaggatctatgaaccttgttcatcgccctcgcactgactaccgcttcgtctcacggtggattccgatcaggtttcaacatgatggcgtcgtgtcgacggaatcaaagtcgtacgatgctccacgccatggaaggatataatgtgatccatccatggcaccagccggtatgagagccttgctaagctcctgctgagctgattgactttgcggatatccttctctcacgcgagtctaggcggtgatgaaacgcgaatcgaccgttctatagctttgcagagtgatcgaaaaggcggtttgccattttgggcaatcatctccgcatctcgactcgcgggtcaatagccgctgcgaatgtctcaggggtggtgttcggatctcgggaggggactggcgatcctgggcaatgagcagggcagaacggcccgcttgaccccgtacaaaccgcggtgtctcaactcacgtccgcctgttgggtttcccccggccggcaaggacggccaatcaatgctagacgaagggacgaacgggtggctggtatctcgttaacgtgattcagttcgaccggcgcgagagggagaggtcggagtctttaagtcgcgcgtaagcgggccacttacagacgtcataggctaagcgagatcgatggcgggaaatggcaagggactcggcgcgtgagcgagagaggaggcgggtcgagccgtcgcgccaagggtcagtggatgttgtgtttattcctcttttgggctgtaaggatcgaccccctccagcttccaaaagggggattacatgctgcaccaaccatatcgaccttcctctcttgatcaaacactcgagcagtccagcaaccctccgcctctctcgccttcgccatcctcttcacccgcaatttgtcgtcatcgctcccctttggtccgcccatcaacgcttccaggtaagcaaaagtggatgtatatgatcgaaccgaaaaaggatcctgattagagcctctactacgcacatcttcgacctctttccttctccttaacccaggttctactcgatttttataatagctctctgcctatcgacctgctatctatcaacagcatcactctcaaacctctctcactcgacaatcttaccaactagatcatcactgaacttacaatggcttccccagctctctccggagtgagttcagcctcgaccttgtctcaagccactcgaaccttcccaatgcggaagacgtttgagttggatccatactttcgacgtcgatcactgatatcgacctcgatacttcttacgcctagttcttcttctgctttgcggcaatggtcctcctgatcttcgtatcggtgtccacgcccgtttggcgaaacatctacttcctcaaggccaccgtcaccgacgaggtccgatatggaatctggggttactgtgtgcagggaggagaatgctcaaaggccatgctcggatacgctcctagcttgacccccgccggtggagagtgagtggcgatttgcacataaatcaggtcctttgggacatgggcggaatctgcatccctttgcctacctttgacacctgggttctgattattgatttcgtcgtatcgtttattgtcttctagctacactgaaggatcttcggtcctccagaacttcaccaaggtcatgatcctgcaccctatcgccggagctctctctctcctcgccgtcatctggggtctcgtgagtacaatccgtactttccgccgtattcgtacaaagatcgttgatctgattcccttcttattgtgatctccagctcggagtctcgctcgcgtcgaggacttgcaccatcctcatgtcgctcaccgccttcctcgccctccttgctgctctggtcgcctttgccatcgaccttgctctttggatcatcatcaggaacaggatcagggaccgaggattcgaggccgagctcgtgcgttctcaaccccttacttcaagtgtaataatatacctgaaaagctcgctaacgcaacatttctcaaataacccagggtaacgccaactggctcaccgtcggtgccgtcgctgcgctcattctcggaacctgcaccgccgcctgtggatcgtgtggacgattcgctaccggccgaatgggtggtgagaagtactaggcgactttcccggttcccagcaatacatctttggacagtgcgaaggtccgcttggcagcatgggacgagcatgatcgaggatgtcggatcagctagacgatggagcatcggttgacttttcgacctagaggcatatctcgttcattgttctcgatttctatttgtcctacctcgatcctcgacgaggacagacctttgtgtgggaaaggagcctcacgaggacagtataatccatattcactatatcataataatacacggttcctcggtgcagcttcgacgagctcgtggtacagagaatcgacagatttgcgttgtcgccgggagcggcaagccgtcctaggtccggtacccgagctgcttcaaggaattcatgcaagatcgactcgaaagatatcaaaccgcagctgacgactttactgcatgcttcgcccgagcacaacgtatcgctgccactcgatgtttgtagagctgatatagctcaatggtcgcgtgaggtaaggtttggcgacgatgatgaatcggattcgtcaaatgtgtggaggcaaaagtcgggggccttgctcagcggacctcaatatgaatgtggcaatctatacatctacatctatattatcgtctagtgcgagattatccatgagctggcattcgctagtcgctgtcctctaacttcattaagaccttttaaatcctgctggtcagcagattctcacaagctcatcccgataccccctcatcgcctctcaagactttcgcgccatggacgatgcgtctgctctagctgcgtccaagaagccatcttctatacctacaaaccaagaactacgagactcgcataccgaggctttgaagaccatctcggacctcttcactactgcccttgatggaaatcttcagcttgacgctttgcaccgagaggtcgagctatggaagaattcgtacatgcaagccgaacgagctcggagcaagctggaaaaggagataaacacgatgaagagtgacggtcctggtccggctataggaccacctttcactgccattctgattgacggagatggtgccatcgtaagtaaccatcttgcattcaagcatgttccagctgcctaaacaccccagtcatcttccttgtcgcaattcagttcgacgaatcgttcgtcagccaaggtgcagctggtggcaaggaggctgcaaaactgctgctctcgagcttgccccagatgattcagtcgacggtcccacacctggccaagaccaaaggtctttcggccttgacgggaaacgttgtcatcaacgtgattgtaaataggttcggtctctcttcagccatgttcaaggttagtccatggtgggtcggagaacgctttcggaacgacagttgacattcttgtatcgcagggtggccttgtgcgaggcgtcggacaggtcaacgagtttttgcttggtctgtgcaaagctcacgattctcttaatggcgagtctgaagctgtctttgcaattgcttgtagacctttcgctgacctgttattgccgcatatagtaatcgacgccggacctggcaaagaagcgtccgactcgaagatcatggctcagcttcgattctacggtggcatcgctcagtgtggcctgatcgtcttggccggatcgcacgataatggatatgccaatccgatccgctcgctcacgaccgagggcaaggatgtcgttctgcttgaaggtgtccctgtcgcagccgagcttcaaggtctgtgccctgtagccaagatcccgggtctcctccgcaaggaaaagatcagctggaacgagaagacaatgatgtccggaccgggctctctgccgcatcgcgctacgggtacaaatacttcgccaggccctgcctttgcgaggtacaacatgagtaccgccaagatctcgcccatcgccagagccagtctcgagactggcgaccccactgatggcgatgcgtccgacgatcagagcgcgtggagcgaggggagcgcggaactcgaggctgcggaactcgactctgatcatcacatccaaatcctcacccgaaagatggcagccgcgagggttgcatcgacgccgactgccaaggcggccaagaaccgtccgatcgactctggcgaggacaccggaaccgaacgcctgcaatctagtattaaaccagcaaatcaatctagcgcgactacgtctaataagaaggagaagaaattggttaagaaggccgccgtcacttctgaatatcagagcggtgccgagcagcagatcatcatcccagcggatgagaaggcattgagggtcttgaaccccagaccctgtcataagtaagttgcacgaacgcaaaagacttcaattgaaatggcattaattgttcacaaatttcaggcattatctcagtatgtaataaaagctatccctgtgtcggaattttcaagctgacaatcttgcctcgacagctcaagctggttgcgacaataagtcgtgtactttcgcccataattacagtaagcttctgatcggtctcaccgcctcgacggattgctggctcatgccgtgactattatacagagctcaacagcaagcaactcgtctacctggcaaagttggtcaaagacatgccctgccccttcgccaagctaggaagatgctccgagaccaccgagacttgcatctacggacatatctgtccccacgccaaggactgcacctggggacgtgagtcactgctacgatcaccattgcgcgacacgctgactgattagctccattgatatagctgcttgccgtttcaacgatctgcccgacggcggacatggtaactgggttttgtactaggggctcgtagtaatatcgctacatgcttcttcttcacgagtcattcattaagctcggcgtcggggaatctgatgctggcagaagcgatctatcagatggtccccgccttgatcatggccaaaatcttgcttctcagattactacgccccggtctcaattggttggagacctgttccctactcaatccgctgaggcatcgggcgacgggcatcagctatcccgtcgtctgcaacggtgactgctgactcacgttctctcgcacacctgatcggatgttggggcgactttgccaatgtccatgagcgtctcgatgattgcatacttggcggtctggtcactaccgctaacagtcttggtcgatttggccgaactcttaggggtcttgcgtggggatttgttctttcctcccggcgtcgcttcgggtttgggtttgatatcgggagtggcttcgcgatcagtcgacatgatgactagcgactacagcggtcagctgctggagacgaagcgacaaccaaatgcgtacttgctggtttgtttcgagacgaggatgccggttcttcgaatattgacgccactcaggttttgaccgtcctccaggtagaagtgagcaaagatgagtctattcgtgtgcaaatatagttatataagtagcggccgagaagcacaaaaccggacaaagatcaaagacctgctcggccgatgatctctttgttcgcagcccagtcaacgacctggagtggtcattggaccgcaacaggaagcgacgatcttctaagctctacaacccttttgtgacttgaggagcgaagtgatccgccttggtggggcgtttgagaagccagataaggtataaacctgcaatggccaatttgcgacatacaaagggcccaatcgaacctggcgaatgcacgcacaccttggaaaaccgtgccaattgcttacagcggatcgtccgtacacccgttaccgtcaacatgcccaaagctcctgcagcgaaaaattcgagcaatgttaagcaggaagagactgagaacggctctcaggtcaagtctgaacctgaatttcccgttacgccgaagaaaagaaaggtgcccagcgatggcggaggggcttcgcccagtcacaccaaaaaaggaggttggtccggcgaagcaaaggctaaactcgcaactttcagtcagtccatcgatccggtactgtgttgcgcggaagctcatccgacttcatattgtctcatccagtgcttgacaaaggttacaccagcatgactacagatgattagaacatgatagctggccaggtgcgacaagcgggtcttgagattctcagcaatttgcttattggaactcgaatccaattcagatcggcgtcaccgctaaccaatgcaaagaccagtttaaaccaaagaggagcaatgttaggagcgctttgcagagcatgatcgatgggatgtaggatgaaagagcaactaggttcctagacatatccactagaggtccctgctcaactggatgtagagtgctatgtattcatgaccgttccgctcggtgatcgaatatcagcgctacaagatcgtcaaacgcaagcgccctagagcgacagacgacgtatataaactgcccgttcatcgcctctttcccttgcccttaggtcgctcctcatccgaatcatgtcccttctcagctcgatgacgctcgtcatctatgaccgcatggggggcgtcagtctaccttagcgacaaagagcgagaacgcacaacacccacctcgcttagccttgttctccaactcgtcccaatcaagaccctcatcttcgtcctcttctccgctaaagtcttcgtcgtcgcttgcatcatcgtcaaagtcatcctcgtctgaacgaacggtagtgaggttagcgatccaagatttacctcctacagcctctccgtactcaccatcactgtcgctgaatccgtcgctctcgctctgatcgacgtcgctggcggcaaactcgctctcggcgctgctctcgctgtcttcctcatccgatccgtccccggtcaggaaggtccatccacccatcttgtaaaattcttgtgtatcctcttggatggtcttcatgatggcaggccaggacaagttgacgggaccttcggaagtagcgatgtcgacggagctgtagacggcgaggatacaaccaggtcgatcagagatccttgtttgatggcaccgtagtgctccttcattttcgactcactctagccacaacttaacatcatccaactgttccatgggtatcgagttgatatgtacaggcgaccgcgtaaagtcgctaaagacgaacaccatgtcgaaattcttgagcccgaattgaactcgctccagatggcacacttcgatttctttaagagttatgaccagaaaaggcgcatccgtcaagtggacgaggcactccgccgtcggctgaagcaggacgttgcttcggaaaggaacacccgaaaaggcgagttctcggaacggcacgtcgacctcgaactcgcaatcgggattgtcttctgccgactgcgcgatcttggcggcaaagtgctggaactccttgttcagctgctgacgctttcgacgttcctcttgctcctgttcaatttcgtcttcatctccataacgagactttcgctttcggttgcctgtttcgtcaaaggcagcatcggttacttcacggatgaattgcacgtcctgtagggatcgaaacagcatgtgagtcggcgggtatcactcgatgtatgcacaagctgacgaaccttggccttcttctttccgctcaacatgattggtgccttcagatggacgtggatgatgacgtgcatctcgtgatcacaaggctggaagaagagatgtttgatattgctgaaaaggagatctacaggacagcgagactgttggcgatgtgatcgcgtagcggcaatcgcaatgcgcagtaatggacataccgactctggctccgttctgagcgtgatatcgcaaaccgttctggtgaatctctagttcgcccggagcaatacgcttgttgtccagagcgggccggatgtgcacgtccaacaatttgtggggtcttcgtcctttggccatcgaggacgggagagatcagcttgccgctccgcttacggtgttacggtcgtccgactcacctttcaattcgatcagcttctcctgctctacgacgtcggcgagatccctcttctccatctccctcttgttctgtgcctttcgcatgttcgtaatggcctcggaaaccttggacatgtgggacttgtcagacgatcggaaggtcgcgcttcggatgaaggttgcattcggattttcgaaaggctttgaaagcgaaccataacatcattagcacaagggtaaaactctatggttcaattaaaggtctcacagtatcctccttctttcccaagatctgaccgggagactggaagttgattcggagcatgctctggtcgccctcgtccgtcaggctgacgttcttgatagtcgagatgtggaaaggggtgatgaaaccgtggataggcaaaatgactgtcgacttggcttcgtcgacgtagatctagaagtattcaattcgtttcagcatgccgtttcccgtgaaatgatcacggttcacgaaactcacccgcttgttcctcaccgccgcgggaagctgatcctctcgacgataactctcaaacttcttccatgtcttgccctccccaccgctcttgccgtcctttgagcccttgtacttggccattccagtcttctgaatcgcttcgtggagctcccgttgatgctgcttgagcttttcggccttggactcgtctacttccttgccctggtttcgagtcttggctcggaggaccttgtttccgacaacgacgctctttgcgggaccatcctttggcttggcatccgactttttggctttgggccgctcctctggctcagatgcctgcgcgcgcaaaagatcgttattggcaagcccgtatgtcaacggattgtaagcctcatgctcacctcctcttcctcctcttcgtccaggatcacttcgtgtaccttctttgtcccctcagtgatcaagattccggtatcctgaccgaccttgacggtgtccgcgatctgaatggcgtacctatctccgcgagggttggggtcagtctcgacgcgggtcgcagaaaatttgagcacgactaacgtcttgttcttgttttgaggatcagggatattggcgaacccaagagccaaattgaaaaccatgttctcgcgcaacgatttggtgcttttgccgttgatgacatatgcgctgtcgcggtagtcgattccggtctgtaaacgaattagttcagcttattgcctcaggttcctacgaaccggaaggatggtgcgacttactccgaaaccgatgctcttgaccatcttgtcggccagctcgggtttcttgctctgcacggtagtcacagcaaactcgtacaattccttgacctgcactccagccttcatctttttcaagacggcttgttgcaggtcgagcaaaaagacgtagtttgcctcctgggtctgtttcatcgcaaggtgactcgagttaaacacggagtctggccataacatagaaaatcggcagacccaccttgtggggggcgatcatgaatgtcctcgcaatgttactgcagtactccttgtatttgatacccatgctcgccaggatgacgcccgccttcatattgtcctgattagactctgcgctgactttaaggtcgtatttgccacccgactggatgatcggggtgtagacccaatccgacgtgctgaaatcgatgttggcgagctgcttgttcttgttccagatcttcatgtcaggctccttgttatcgtttccgagcttctcttcgcataggctacagagatcttttcgtaagtcaccaagcacgacaggcggatccagagatcaggacccgcactactcacgtcgcaaagtattcgtgagacaccttggtgcccttatcaatgatggcctccatcttgggcttgaagtatgccgacatgatggtcgaacacaacctggcagcgatggtatgttgttcctgatttgtcgcgacgactatgggtcagcactgcaatattttccgggaccatatctgcgttctcgaacgactcaccaactctcgctcgtctttcggtgccaacaccgaggccatggccggagtgacatccaccatctcgattgctcctccagtcttttcgagactattgaaatcgcggccgtccgatccacatcagcgaatctccagcatccaaatcatcgaccgtcaaactactcaccaggccgtccaatcctccaccaacttgccctttggagcgtctttcacgaaatgtcccatcttgagcttatccgacccttctctcagcttgtctacaaactcttcggtcgtttctacgtgcacggatcagtcagggtcagacacggctttctctgacttttgctgacgggacagcatatactcactgagtccaccggcagcatcctttggtcgcgagaggacctcgaactcgatctcgctcgtgctcttgatctgtgagaggatcttggctgtcgtgccggtcatacggtcgtcaatgtgtatgatgtgtcacatatgcggacggtcgaggaggagtcgatttggatggagagcgagtggcgaaaagggcaaacgacgttcagccacccattcgaacgagtcaaacagtctcgagaagcctcttggggagggtcgacaagaaatggagagcattcactcaccttttgatgcagacgtcaaagcgatgactttattaccagaagccgtttttcggaagacgaggatggtcgaagggaattcgtacccgagcatccaggtctaggaagggcagatggtacgagatgtaggagagcgatcgctgtcagctgactgtgaacctattttctgcagactcgccaaagatggctggatacttacttggagagccacgcccttctttggggtcaactcttcttcggcatcacccactatcacagcgattccatcgacgcctctcagcccctctaggtcagcgtcattgtcggcttgctggtgtaccacaagcccaagtgtacacagtcaccagtcagagacgatggggaacaggatataacgatgagtccgagcggaggggttgaatgagctgacatgaactcacggcccattgtgagaagagcctgtttgtcctggcgtaaaatactttggaatcgatttcgacgccagacatgatgattcgtcgttctagcttcttcgaatgggtcgcccggcgtctctgtcacaagatcgaattagtgttccgtgtacagagatgttgagtcaaatttgtagccttcgtaaacagcaaggcgatggagagactggcaaggaattatataacgacgatgaagaaggatgcatcgaacccaaacgcgctcgctgcgtcgacgagcttagagcagcgtgtactttcatttgaacgcgatcgaacggatccggacaaggtcaactagcttgattaggtaagcataaaggtaagaatccggatcatctctatatttatctatgactattcatatatcatccaaaggtgttataattattggtcgctgaagcgggccttgcaaggaacaggtgttgcttggtgtgtcctgtcgagagacgagcgacgggatggtcaggtcgagcggtcgatatcacttgattattgtctgatgagctgatgatgaacctttcgacgcgaacacggtaaagcgcgttcaagctagaggttcaagctggatctagctcgaaccattttatcacaatctccccgttgaacacaacagcgatccgtttatatcgcagaattgtcccacaagttcctcgatcagtttctgccgacagatcggtgcactgaacttctcaatcatgtgtaagcgaatcacgatccgatcacgcctgtacatcacactcaccatcatgcctcggggaaacagctaaacgggtcacagggaggccctttggtgctcacaacgaggccattcgaaaacagctcgtctcgccagtctgggtgtggaagaaagaatgggtcgcgccgccaggagtgccgcaagacggggcttacaaggcgagtcgacagaaggctttctgggctgattaggcgaactcggtctgaccgtcgacagcgtaccttccatgtgcgtaggtgttgaaatgggtcaagacgcaggaacgagtaggtagactctccattgggtggtatccgttcgtctgtcctaaccccgttctgtcttcaatacaaggccacgttcgacacatcaatatccggagctaccgtcgaggtcgaagcagaagagaccgaggagaacgccatggaggtggatgaagaggaaggtgaagctgaagccgaaccggtcgagggtgaggccgaggcagaggtcaaggcagaggtcgagcccacctcgactggggatgccgaggatcgcgggacacatttgtccacggctaccgaggacgcctccgaggtcaaggctacagtcccagagtcgaccttgaccgtgagcgaagacccttctctcgctcaggatagtaaccctacggacggattggtggagatggacaccacgggaacgatcggtgtcgagagcgtacaggcacacgtctcgatgcccgacagtgaacagccgcgagtcgatgagctggattcggacaagatgcaagtcgaagccgatcgagagggggatcttcaagcatctgtgctggcgcaggactcggcagatgttcaccctgaggaggttgaagaggttgaggagcctgccgccgagcctactatccgaccgatgccttcaaacgccgtcgaggccacgttcaccaccccccaaacggcccaattcgggaccacaacagattctgcacaactgggagacgtgacattcactgccgctcccgaggcaggcgcgtccacatcggagtctcgcgacgaggacgagagggtggaaatggagggtgtacgagaacctggtgtaccgctcggtgagggggatacggtcggggtgaacggtgtgatggaggtcggggacgaggatatcgtcagggcgaaccacgcagaggaaggttaataaggtgatcgatgatgtacatctggacgttgtaatccggtggtcttggtgggccatttcgcacagaatttgcagtcctcgcaatattttattaatgggaaaaatacgcacccatccatcgagagtccaattcgggttcaagcgccggagtggtcacggattatgattataacacgagcatcttgttggtatgctacaattcccgtcgaagtctacttttgaaatacgaatttattgcttgctcaatgtctgcatagtcactagctcgaaataaccgccacggagagccaaaagttcttggtgagtaccagcctcggcgactcttccatccttcatgaatatgatacggtcgcagttctggatggtcgacagtcggctgaaaaggtttaagagagaagcattgttgtcagtatttgatttcgatcggctcttgacgagcgccgacactcactgagcgatgatcaaactggttcgtcctcgacgagctcggtccagtacctgcgagacgatcaactcgctctgagagtccagagccgaggtggctgcaatacagaaatatcagcgacccgaatcactgcagcgccataacgatattctccttaccctcgtcaagcagaaggattttcgggtttcgaatcagagctctcgcgatagcgattcgctgcttctgacccccggagagctgagagcccttgttaccgaccatggtgtcaaagccatcgggaaggctgacaataaagtcgtactttggaacgaatctcaaggcagagtcaggcgctgctacccgcaagatcagtctcggacactcacgatgttcgcgtccttgcaagcctgaatcaattcctcctcggtcacttcggcagccggcttgctggcaccgagcctgtgcaaccagagggtcagcacacttcgaaactcgattgcgaagaatgaccacctacaagacgttgaacctgacgcttccacgatagagagtcggttcttggctcaccaaagccgtgtggcttcggaaggaggcgacattcagatcctcgagaggaacaccatcaagggtgacgatgccgctcaaggggtcataaaacctttcaacaagaccgatggtcgtggatttgccgcactggagaagaagcatattgagtgtcagcttttcgccgcgtggtcggctagactcttgcctcaacgtacccctgaagcgccacagagggcgacagacatcccggcagagatcttgagatcgaggccacgcaagacccgtacccccggtcgagttgggtatcggaagtgaaggttctcgaaaccgatgtctccaactacctgctccctggacaatatcttgccctcggtcgactcggcgtcaatctcagggcgggaatcaatggcttgaagcataacggtgcagctctgcttcgccttggacgcgtctggaacaaattggaacacatttccggcctagtatggaacaacaatgattaggggattcgatcagcaggtagatgcaacagaccgctcacctgaatggccgagaagacgacagagttgaggaccgtaaagaattgctgggtcgtgtagcgacccgaagcgagccaacgactaccgacgtagaagaccagggcaatgacccagaaactcaaagcttgcgagaccgcatagagaaggttggcagacaaggccgacctgatcgaataacgagtgggaccttcgagagcatcgtggtattctcggcagcagtcctgctcgcgggtcaacgaagcgacggtacgaatggctccggcggcttcgctggccatgtgagccgtcttggagtagaccttcttgttcttctggtccttgaggacaacgactttcaagcggatgaaaccggcgcagacgaggagaggaatgcaggcgataccgatcaaggcaaggaggggcccgaaagccaatcccaagatcataccaaccacgatcgtactgatactttgaatgattgtcccgagcgtgaccccggcaagaccttgcactttttgagggttgtcactcaacgaagaggtcaaagccccggtcgtgttggcgtcctcatcgtagaaagcgacgtcgtgacggagaagagccttgaaatagagtgtgcgaagttttccagtgaggtgttccgcctgggcagtgagagtgacctgttgaacccagattgcagtggcggccagaatggcaacgataaagtaccacaatgcattccggttggtggcgctcgtaagctcactgcctcggagcgcaaagtcgttgatagcctttccaaagacgacggcgagcgcggggtagacagcacccgagcagacggaagcgaagaatccaaggatgtacgaccatttgccctcccggttgatagcaaagcatcgcttggcgaggtaaaatagactgtaaagcttggcgtcttgcttgtgtgtaccttcttccgctcgtttggctgcgagtatctcactggcaacactctgacgagtactcctgcgctccaagaaaggcttttcgccgatgtcggaacgtcgagattgaacgcgtttcgtctctgacatttgcgaggtagccgcgtcatcggaatcagaatcttcttcgacgactgcaaccttttcagcctcttgttgcagcttctgtgcctggaccattccatggtaagaaccttccgcgtccaaaaggctgttgtgtgtaccttgctcgatgatctccccagccccgacgaccaaaatcttgttggcatcacgaatagtagaaagacgatgggcgacgacgatacacgtcctgtccttggcagcctcgtcgagcgctgcttgcacggctctttcacttcgagaatccaaggcactgtagaggaggaaaggtcagtcccagtggtaagcgtaatcccggtcggcttaataccgacctcgtggctggaaagggaacaacgtgtcagaaatcgtcgtgaatatcatagggccatagctgctcgctcaccttcgtccaagagaaggataggtggatcagagactgcaaagggtgacacgaatcagatacagaatgacaaaactcatcatcaaagtcagccataccaatagcccgagcaatcgcgacacgctgtagtaagaacacgtctctgtcaataacgtaattgctcgatgatatgcggtacccgactcacctgcttctgacctccagacaacagatgcccagcttgaccaacgtcagtctcatattgttcaggcagctgacgaggacacggcgtgtaagagagagttccagacggtccaagctcgcttttatgttacttacggccataatgaactcgtgagcattggctttctcggccgcacgcttgatcagatcgaatttcacttctggcgaagcgttctcgtgaggagtgttgatgagaccggtttcaatgttcttcaagatggtcattccgaagagaacgggttcttgcgagacaagaccaatttgggttcgcaaccatttcacgttcagtgtcttgagatctcggccatcgagcttgacaactccggacaatgggtcgtaaaacctctcaatcagggaaactgcgaagccggttataagcagcgatcaacgagagaaacgatgggatgtaactaactggtactcgattttccggatccagaagcgccaaccaaggcagtagtttcgttggcttcgaaggtagtggtctagcaacgcaacgcggtcagtattgtgggtcatatcgggctgaccgccaaatccgacgtaccaggcccttcaagatctcgacatccggtcgcgaagggtagttgaagcggacattctcgaacgtgattcgtccctgacacgagtcgggtttgataccttcgtcgctcccgctgtcgatagcggagggcttctcgatgatcgcaaatagcttagccgcccctcctcgagccttgccgatagctgcgaagcgagataagtcatcgttagtacctgaagagctgccgacaatctggctgtttactaaccctgaagctcaggtgccaacattgctgtacgtcaaaagagggaaacgaattagaatctacttttcacatcttgtctgccgtcactcacccatgctgaaactaccgatcaaaatactcaagaatacggtgatgacggtaccaggatcagcgcggccttggttgatctacatgcaatcacttgatatcagcttgcatctcttccaacatcgacctggcagaggatgctcaccaagatggctccataaaagaaggccaacgcgtaaccagcgtagattacaaagaacatgatggctagaccgagactcgaaatcttggcccccttaataccgacgacggcggccttcttgacataggcgtcgaacaggtcggtaagggtcttctgagctccaaacgcttgagccgtacggatggaggagaagacctcttcggcgagcgaaccagagtcggcaatgtaggtcgaagcgtgctgggtgtacttggtcatactgcacaagagaggatgagaatgagttgtcagcgcgaatgagactggcaggcccgcagcatgcagaggactcacgtcttgcccatgatggcaccggcgaccatgatgacgggtaacatcgacgacgtcgccaaggccaacctccacgatttggctaccatcgcaatcaagatcgatcagtcaccgcgactagcaacatcgcactacccagtcccgcctcaccaaaagccaagatgaaaccggtaaggaaggtagaaatgtattggacggacgtagggaccttttcgcccaacccggtgtgcacgagatgggtatcgctctcgatcctcgtggccacttctccactgccaaggtcgtcaaagaagctgatttcttgcgtcaaggtggccttcaagaaccgctctctgatccttctggaagccaactcggcagtgacctgccagatgaccatgtatccgtaagtgcagaccagcattccgagaccgatgtagacgaggtaagaggcgttgagggcggaatcgtgcaggaccgtgtccttggcttctgcgatggcgatcgggtcattgccctcgagaagaacccgggtgaaattggtaaacgaggtggtaagtcgacctgcgaagaacaagtgaggctgataagcgaatgatcgaacaaaacagctgagacatatgaggacccaccgaaaatcaacgtctaaccgcggaagaaaatcgatccgagacattagcgaccagggaccacggttgaccgatcaaaatacaaacataccatcaaaggctgagtggctccggcagcaatagccatgaacagtcctaaaatgttcaccaagacctcgatcttggtatggtacctgtacaaggtgaacaaggatacggggggaacctcggccttttccttgggtccagcatcgacaatcgtctcgtccttctttttccgtgaaaagaaccccttctttttcgtcgttcccgtcttgcccgccacatccttctcgtcaattttttccgacgaggtcgagcgggaagaagaaggctggatacctagagcttctttctctatggacatgtccgccttgaccatgttcgccccgactgcgggtacggtcgatcccgatttctcggctacatgctgaacgtcctgagcttccggtccggtctgtgcataaggagccgaagccgcgccgatcgcactagggttgggaattcctgaaggcaaggccatggactggaacggtgcttccgaggtttccaccttgtctgacgtcctggatgggattcgatcgacgagggggtccggatgattaggttgcatctccggagcacgagacatggttgcagaggcgctcagttggatgttttggtgctcggtcgagtgtctcttgttatgatcgtatgtgttgcgtttgggtttattcgaatgtcgtcacgatcgaaggcaagctgagaggctttggcccagctgtcttgagaggtaggttcgagcctttgtgaaagaatacctttttcgagattggatcgctcaaggtagtcgttgcttgattgagttgccacgggtgtatcctggtagggtgaacaggaggcaaagaggctggtagacgatagttataaggaacaccctgccgcttgacgacttgcgacttgtgttcgctggtgaacctcgtctggatcgccgccgaaagacgatgatgttcagtcctcggcagttgtcactcggtaggggatggggtcatatcatgaagaagtgtgggacgagatcccctactggccccctgcccaccctggtctagcgtgtaattgttgtgaggccgtgccggagccgcggggtacgcgcaataacgtgaatccactcaagccgggcggccgcgacagcgagactactcatcaagggagtgtcatcgtgccccttctgcctggcttcgcttgccctgccctcggcgatgaccgaagaatccggtttccctcttgctgagaaccgcggtttcacttcagcaaggcacattcccgcaggaagcctgaggagaatcaggggaacaatggggtcggaaggcaggaatcaagtctgtacggcaaatcctcggcatccaattcggtcaattcggccaggttgcgggcgaaaagatgcccgcacaattacgagtcaaacgaccaaaggtggatctgtctgcagcgtcccatatggtctagccatcgtcgtcggacaaatccgggaggtcatcttatccgtccactttcaaagcatgctcgcagacggtcagccaggcaagtcaacgcgcaacagaggacaccgggctcccaactaggaaatgtgatggtagcgcataaaaatagaatgatagacaagcggatcaaggcgagagaggggacatttgaagacatcaaggtcattgtcatcgcttccagaagaaccttcctacgacaccaagcggaagatcatcgagagcggtcagagctcgtcaattcttcccgcatgggcgtgatccgtgagctcctggaaacgatgatccgttgatacatgagaaggaagagaaaaaaggtgacgccaggccaaaggcgattgttctttggactggaacgcatcgagcgaagaataaagggtgcgatacgaagaatccagcaagatcaaagctagaccgaacgatcttcggaccagcaaagaccagttgtcgaatggatggagcaattttttcctcggcgtgaatgtaatgaatggttccagtcgtcgttgtagggagcatggtaataaggattcgttttggttttcgtccggggtcttggcgtataatcctgtttttgtttcgagctgttttttatgtattggttttccgaaaacgaagtcgcagtaacaaaaggcacgtctatgggtgtgatcctgtgtgaaccggtttgaccaggaactctcctggccattcgaacagaccgcgggccgctctagaccttgccattcgatcgatcgctctggctggtcttgacctcgttctcctcctcctcgatggtagagctgccgctcgtatgaatcgactgcgagtcgccccccttgccactgcctatggcacgctgcccgccaatcaccccgttggtacccttggcgttcgagctaccggtggcattgacgttattggagctgttcgagggggtcgagctctgagacctcagctgagttcgagagacgaatcccttgttctcgcttgtgggtccgagaggttgacgcacgaaaccgcctggtaagccagggaggtttgttccttgagtggccagcgtaggatcggaaggcgacgtgggagacgaggcgggttgctcaaaggttccgttgccgagagcgttgccgaacaagttgttgaatgagctactgcccgtcgcaccagtgtgactggcgaaaggtcgacgactctgctggtttccaccgacgtttgcatagtcccgtaggtttccgctcgatcgcttgttcagcaatcgatggggatcacgagagacggaagggccgttcaagagcgacatgttgggcatcgactttttgatccgcagacctggcgactcgggcctcgactcgttcgagtcggccggaggcgtataagtcgacaggtaagagccagactgtgcggccatggactgtacgcgactgctctgacgggagaggacctggtcggacgtcgtacggtcatgagcgttccgagtgacggcaacgcgcatgggccggtcgacactcactcgggacgggttgttcctgctagggtcgaccttggacaggacgacataccgatcttggccttcaccggtactgtagtggtgcagaccgagcttttcgccaacagcgtgaaccgcccgcctgtccttgacagaaaggttgcgcgaaaacgaaaactcgtcgcgcatcctgtcttccttgaacatgagggcacgggaaaagatgtcgaggacaacggggtcattgaaatcgacatcgttgtacccggtctgggagccagggtttgaaggattagcgggcgccgattggttctgagcgaagccgttaggaccgagcgacgggctcaagccaccttgaccaccgctggatgagccatggtgagaagcgcctccgagagacaatgccggtgagggtaacctgtcgggattctggagctgctgcagatgctgctgctgcatggcttgcatactccccgagccgaacgcgctatcttgaccagacttgttatccctctgtacattttgcgagccagtcgtgttggtcgattccgtccgttcacgaatgagcgctccggttacgtgctggggaatatgaatgtgggaaagatgactgaccattccgatggaacccgaactctgtgactgggtggtcaacggcggggtcaacgattggccctgctgctggccgccaaggttcaagttctgcacgccaccaggcagactagcagcgagactttgcaattgctgaggtgtcatgctggcgagcaagttggcaggtatcccgccgaggccgttctgctggttgccgctggaagcattattgccctgaccgctaccgctcgatccttgattgttgctttgcgaccagctgttctgtctgttctgggactgcccgccaaaagcaccggaagcgttccggttggaaccgcttcccgacccattggccgtgttgccgcctgcaggaagctgtccgcgatcgaactgcatgctcctcatccgcttgatagctttttcacgctcaatgcgctccttttcgccggcctgcaagacctttttgtactcgacgcggagcttgcgaccggatatatcgtagccattcaatgcgacgacgacggcgtcggcctcgtgagggtgacgaaagtttgcgaaggcgagtccacggaaaacgccattatcgtgatggtaattaaaggcatacggcaggggtgcctggagactctcctgtatgtcgcatgttagtcgtcgttagaaacgcgtcacagacgatacggggaagctgcgggcgactgacgatgatggccaagagggtctctttctgaaccgcaaacggaatgttcttgatgacgatcgcggtcgggatcacttcatcatcgacgagtttgccgatcatcctctcggctaaaaggagccatgttgtagtgtcagctgcctgccttgatcactttcgatcgagaccaaacctcaccattggcgtcgcccgcattgttaccatcgacggcatcgtccggtgactgctgctgctgctgctgggtctgttgggaccctgactgctgcctctgctgagcgctggacgaaggcctagaccctccctgaccctgagtcgactgagaccctcgctgttgagattgagactttccaggcccggcgaccgattgcccaccgttcccctgaccttggttcctgccctgctcggaaccggtactagggaatccgctccagttggcgttcccgacgtcttgcgggttgggccgactatgcgcagcaaaggggctaccagcgttacccgtcgcgttggggctagggagagcggcagacgaagcgccttccctatctgccaagttcctcctcgcattcccttgaacctgttgtggaggaccttgttgctgctgctgttgctgcagaggcgagctctccaaccacccgcttccattccctccggcgctcttgaccccagccgcgttgaccccatccatccaagcgccaattcccgcgcttcccaagggtgtacccaatccagcgatcccgtaccgagccgcctgctccgcagtgaccgaagaggccgaagcggggaattccatctgtccgcctacttgcccattggcattaggtccgacgtgttgatgattcggcgaagagacgcttgggctccgatacccattctgcatcgactgttggtacgatggggagacggacgaggtctgttgttgttgttgaccctgaggttgaaggtgaccttgattcggggagagcaagttgttgttgttcgcaccggccgagtcccgcccaaatcgtcccacaggggactgtccggggaacccagcgttcccctccccaaaggccgcataaccgcccccttgcatctgtccaccgttcatctgcatggctgggtggtaccccgcgtaatccccttcaccccctcggttctgcgagtgcggatgacctcggacctgatctccagcttcttcgggcaggatcgacagcctgttcaaggacccgacgaggttatgattattgaccccgttgctgttctgcccggcacccttcccgagctgctgttgttgctgctgctgctgaaactggtgatgttggtcgagatgagacccgtactcggtcctgtaagcagccatattcccagccgggttgttatgccccatccccgggctaaggacgggtgagggtgaggtcatacccccaacctgcccgaacgaggggggcaagtgttgcccgtacccgaccatctggggtaaaggttgcggagctagaggaggagggaattgggagtgagacgtgttgttcgtcgggttcccaccgggaggcggactggtcgccgtattagatgttccgtactggctgggatgcatgagggggtgggcagggtggaaattgtcaaaggaagggaattgaatggatgattgaccgttcattgtgcaaaggcaggacggtccggtatgggctgttcgtagtgtttatcggcgccttggcacactgttcgaccgaagtttacgaggtagaaacggatggacgagatatcaagatatcctcgctgaatgtgaataaagttcgtcctgcgtcaggtgtggacgtcgagcgacaaaaggtaccgatgggtgcgtcgtcgacaaggcgtaatttgggcagtcaaaaccgtaagtcgaggaagagaatagttcccggacgaggtcgaattgacttgctgcgtatttgggagtgactgacgggtttcgaatgacggtatgggacaggtagtggggttcttcgtaggtcgttatgccgtgagagtttattcgatttgctttgatcgtatcgatactgcgtgaggtggtgttgatgatattgaaaagaaggtcctcttgatcgatcacacgaaacgatcgtatgaggtccgtttcgccggggtttcgtcgatacctcgaaatcgggctggcgagttgagagtatgggtcttgtgtgtcgtcgtcgtggttattcgtcggcgtggtgtcgagagaagactttcttgttcgaggtgtcgttcgaatagatgtgatactcgctctctctcacacactacgtcgtcgtttcgtcgtcgtcacagggaagttgttgaattggtgtgtcgtcgtcgttaaaccgttcgtcgtcacaagaaaccgaaagcggcggtgagagggaagaggggggatgggcgaatgagaaacgagaccgagcgcgtgcgtctgatgacaagagagggagggggggtcgtcaacgggtattcgtgtatatctcgttcgatgtcgtcgtcgttgcgatgtgaaggcggcagggtgagtataggtacggtcgaggatgcaacgacatggttcgatgtgtccgtctatcgctgtcgaataggggtcgggagcgtgtttgattttctctccgttcgactcggtttactcgcacgcgttggttgatggagaatctcccgatcgggaaactcacaacaaccatcagcacccatcacccatcagccatcagcctcaccagctcatccagctcatcagcttcctcggctcatcagccaccatgcaccggtccccgtggcgttttccctcgtttcgctaccgatcaccttgcccccgcgcagacaaacaaacgtaaccgaattcgaacgcgcacgcgcgctttcatctgtcaccacccgctcacccgaaaacctaaagccattcaaaataagaaatcagacttgtagtgacttaatatcgatcaatcgatccaaggcccgaggcgcgcgaagatcgtgcctgccatgagcatcagagtttcgggttcgagtttcataacgatccagttctgattccctgacctctggtggcacagtctctcttcaggtcgtcgtatatgcatatcgtttacatcgtcgcccccgatcgagcgttgttcatctggtcactcgtcaaaaaagtacaaatattcgtgtcccgccgtaactctttctcactgctcctgctgttcatgacgagccaaatccaggtgacgatcatttcttgctcagaccgaaattaaacaacggtttcgcgttcgactcgtttgggctgggcgtgctgggtaacccttgctttgtcgtcgtcgacgaggcgggcatggcgaaaaagttggacctgtcaccacatcttctgatcagcctcccttcacaccgcccagcttttgtccgaaagaaaaggcggaattgaaagccgacatagatgcccaactcacccgaatcccgtgcccgtcgtaccggccgtaactccgcctgccgcgagtcctccagtgtggaccgggaccgccgcctttttgcttgccgaaccagcctcgaccttttcccgctgatgcttgttcatcggtctataccccgcccgactgttcaacccagaggtcgaaggagtcagaccgaaatcgaacccttgcatcggttggagcgggacagtcgagggtgaggttgcacgtgtggactcatggttggcggaagggagggaaaaggccggcttgctcgagccaggtgtaggccccggtgagaatcgggcaaagagggaagtcgtagagccggatcgctctgtcatactcgaagagccagctcgaggggtcgacatcggcgggacggcgagggtagacacttcttgcacccgttcaggtttcatcgtcctcggtcgcctcagctccaccttgccgccgataaacttgcccttgctcggcgcctccccctctttgggcgcctccacttccttgcccgcggacctcgggaccatgctcaactctgatcggttcgccttgaccgcacgcaacaagagatctccatcgagctcggcattcatcgcctcgctgaccagcttgaccggttcatcctcgcccgacaggccaggcaggggtcgagcccggttagaccttgattgcgtcttttgcagcgtgagagaatcgatccgccgggagagcgcatctagatcgtcttgtcgttctctaagaccgagttctagagacttgacctgtttcgtaacgccatcgaccgaagatgactcgctgaaggatgtaccgcaactacgtatcagtagagcatcacaacgacgatatcttctccgccgctccgccgacatacctcgatccctcgaatttggcctgctccaccttgcgtatcatagaggccagttggatctcggctcggaacaagttttccctcgccccctgtgatcaaagggaatggagtcgatgaggaacgataaacaacaaagtgtcccgcgaccctacgtaccctcacagccctgcgcaggtctttctgctcgtccgcttgctgattcgaaagcggtcgttgtcggagcgctcgccgaagttcagggtcgttgaacgccttcagatatcgcgcacagtcatcagatcgctgtcgaactgtgtcgtacgagcaagatcagctctcgtgtgacctttgctgtcagaggtggccttccgggacctactcttatgaagaccggcgaccatgtctttgatgccctcattcaactcagacccctgctgccttgcctcgctcgcttcacgagcaatctctttcgtatacgaagctagggtgtcgagtgctccaaagtaccagaactctgccaacgcgatgtcctcgcggctgggaatctcggtaggagcggtggaaagggcaacatggtaggcggcgttctcttcggcttgcatgcggagctgtgcagggacgagggaatgcaatcgatcaggtttgcggacgcacagacgatcaggctcgtaacatacctcttgcaactgcttttccacctctttgtagacgagcgcaaactgagcagccaagccggaagcagacgtaacggatgggttgttgacttgtcgggcattgggccggacgggagtatcagtcagggtggcaggctgaatggtggggatcgtcggtgtcgacggttcaggcaaagatgggggtggtgcaacgggggaagatccgtcacgctgttgcgaagctggggttgatactttgctgatcgattggaagaaggaagggggcgcgacgtccggacgcttggccttggtctcccattcttgagcgacttctcgtacgtgtgttcccgataaagttcgcgcgtgatcgaggtcagccgtggattgaacctgcgattgaggtttcacctcgtcttgctgattcgaccgctgtcgttttgccggtgaaggagcccttcgttcatcctcctcggtgccctcatcgtcttcctcgtcgtcgtcgtaatcgccataactgtcatcttgatcatcctcgtctccctcctcgtattcctcttcatccgaatgctccacgagctcgccttcatccgtatcgacgtatgcatcgtactcctgctcgtcgtgctgcgctgaagagctggcctcggacttctggtctgcttcttcattttcgagtggaggaacgtcggccggcttgattacttctccactaaagctgctgctcgtagagcttgagggttgcgcaggcaatgtctcactggactgctcgtccttgacggccggttctgtgaagctgaaggatgagcttggctgcgatggtggcctgccaaatcccagcgccgtctgggcttttggtgccgagggtgctggggtgggcgtctcgacatcaaccttgctttcttccacttcgtctggcaccactgcatcttgagcggcgtcctctgagggagaagtctccgctgccggtgcgacttcctcgtttccctcggcatcttcatccttgacgacgtcggcagactcgggctgctcggtttcagtaaacgtaggctcttccttcttgtcgtctataggcgttggcagggggaccttgttttgtacttcggtcagaccgtcatccaaatcgcccagagagaatccgaccggttcgggtgactctttcggggcgtccaaagtcttcccatcatccttcttgtcacccagcccaaagctgccaaacgaaaaggcgtccgtcttcttctctggacccggcgtcgaaatgctggatgtcgattgaccgaggggcgacggtttaggcgcaccaaacgctccaaaagcggaactctggccgaaagcagataccttggggagctcttgcgtggatttgggagcaaagcctgaagacgagccaaaggcgctcgtcccgaaagcgctctttacgggagctggcgacccgctcgtcgagctaccaaagctcgatgagccaaaggcaggcttcgacgcagaagccgacccgaatgcagtcgttccaaaagccggtttagtgtcggttgtcggactgctcgctggagatttcgagagggatccgaatccaaacgaggcgctcttggcaccgaatgtagcgggctgacctggcgtgctcgctgcgaaaggtgagctaccgaaagcgggcgtcttgggctcttccaattttgtggatccatccacaggcgtcttggcaccaaacgcagaagctcctccgaatggcgagggctgagctttggccggtgtcgccaaggcatccgtcgagggcttttgaccgaaagcgctggacgagccaaaaggcgaactcgacccgaaagccgaggtcgacccaaaggccgactttttcggttcctcgggagcaggtttcgccttgtcgctctcgggtgtgctagctgtcttgggcgatccgaaagcacctccaggtccaaaagcgctcgacgctccaaatgctgagccagagccggattgtccaaaagccgtagagccaaaggcgggtgacttggctcctccgaaagccgaggccaagcttgtggtcggagcggacggcgtcgacgatccgaacgctgatgatccgaatgcgggacttgctgagccgaacgcagacttgccaaacgcagaggtcgaggtaggtgcaacggtctcggtcttgggcgtactcgcacccgaagcggcgggagatccgaaagcggacgaggaaccaaaagcgaccgtcggcttggtcgcgccgaatcccgagctggatcctccgaacccacctccaaaagtcggtagctttgttgtagcctgtccgaacccaaatgcgggcttggacccgctcgtaggggttcctgatccgaacgcgctcgtgcccaatttgctcttgctcggtgcagggacctgcgcttgtacaccttccgcggcgatcgtgggaggtgcagtcgccgctgccggaccgtccgtctgcgcctggagtagatcctgcggcgtgaccatccccgggtattgcggggtcttgctattcaggatgtcgtaaacgaccacgaccccatcgttcgtgtactccatcaaccggggtgcgggtggcaaatccggctgagccacccctccctcggcttcctgcttgatcggcatcgagctcgtcagatcgacttcgagacccaagcaggtcgtatcctcgttctcgtcgttcatcggtacggccggtctcgccgtctcgtccaagagcgcgaccttccattcgggtgtctgagcgtcccctagcgagtcggtgtacaggcaggcgatatcggctgaaggcggtgtggagaggaataccagatgcttgacctcgtctccccatcccttgatgtgcgccgtatgtctgaaatcgcctcgtctatccatcatcccccaggggcccatgacgtcttgaaactggacgaacgagaacctgggcggattggatttcggctgtcgatgaatgagatgatgttgatgttccggatcgtcgccttgcttgccatacgtcacgagaaacacgtcgttttcgatccaactgatgctcgtcgctcggtacgctccttgtcccttgagtccatcgggaaggggcacggtggccttgggtgaaccgtccggggcgtactgttgcagcgtcccgtcctgtttcccgacgacgaattgacggcccttgacggaccaggcgatgctggtgaagggttcttggatcgaggtgagcgtcttgagctcggtgtcgaggtcgaggatctggagggcgtctagtgacaaggcgatggcgagatgaggaagaccgccgaggagcgatggattggggaggaggttgacgagtggggaagggacgtcggtgtagtgtttcagaggagacagctaggggtcgggaggtttagctgagaacgtgaccgccaagagattcctggaaaagcacgcaccgaaccctgtaatagctgcttgacatcgaaaagcagcacccccgcatcatccagacatcccaccaatacccccttatcccccatagccagtctaaggagagtcacgccaagcgaggtgaggtctcagagtcagcgaacagtatctcgagatgatcgcgccatgacgggaccgagcgctctcaccggatccattgtggtcgaccgggaagggtgacggtcaacttggcatccgccctattgacaccctccgggctctggctgagctttgaaatatgatcgagatcgaacaagagcaattccgctgtatcggccccgaacgccgggaaagaatgtccgggatgacgagtcagtgtgatcgactcgttcgaaggctcgtctcgtacccccggacgtacgtttcgaggtcccgatgaagacgaggttccagctgttcgagacggccatcaagctgcaattgctaggcaaatgttccatatccccgaacggctcggtgactcggacatggacgtcgcttttagccggtttgaccacccttagccactgttggacgaacaagagtcgtcgagcgccaagcgtcgacagcgtgagtttcagtgcgtctgtcgtccatcgctacgagcggacgagcgggactcacgtctacctgttcctcttcggctaccttttcatcaaaggccgcaggtgtccctgatccttcgccttccaccttgagcacctcgaatgggttggacatggctcggacagtggtcggctcctggaaaaaaggctttcagggcaggtagtgggggttgacgagctctgagaaggtggtgtgcgcggagtggtgtggagtttgtaggtttgcctcggggatcttgcactctgctattcaatcgggcagatgattatgatgtggggatggtgaggtcaagtcgcgacctcttccctagatccctagactgccacttgctccttgcttgacctttgtcgagttgcaacttgttcgacatgcgacctgtgggttagctagttgctagttgcgagagatgcatctgattatgatctcgcgtcactttcaagtctagtcaagtcgttatttggtagtcatagttgcagttgcaccgcggatgccgtcattcctcgcaatctcggctcggctcggccttgacctgaacccaaaagttcgggaacgagcgaaatatgaacaactactcagctggacggacacagacagatgtcgaggtggacaactacgatttgacaacctgacaacacactctactaacaaaccaccaccagcaacgattcagacgaccaagtctattagacgaccctcacgaaccctacatacccatcgcccagaacaaaaccacaaccccggactcgttcgtcgcccaccatgtccaaaatgctcgctcccatctacttgcccggccaagaacccatgccggcaggtaccaccccggaagagagggaagagatgcaaaacgtccagcggtggcagaaatacgctacgatgggcatggagagttgtcccgtcaaggtcgggatgagtgcaggagcaggtgagtcggtggaggcttgctcgttcgcatttcgcatttcgcgaggtaatgcgatgcgacgcgtagacgaaagcgtagactgatagcacgttgctcgctatcgccactttgaacccatcccccatcccccctcgacgctcaacccggccgcctgctcctcgttctcctcaccccgacaggattcgcactcggaggtttcttctccctcatgtccgccacgtttgcgtacgaagaccccctctcccgcgcctcggaaaaactcgtagggacgaaagcgcagacaatgttcatcttcaaggagatgggcaggaatatgtggtcctcggggaaagggttcgctaaagtcggagcgctgtattcgggatacgagtgttgcatcgagggggtgagtcagggttcccatccatcccgtctttcctcgaaccggacacaccgtatgtcgtgtttacgtgcggataggtcgactgatcacccccacctttcatacgtctctgcccatcccgcccccgctcccgccgtagttccgagcaaagaacgacatttacaattcagtcgcaggagggttcttggccggtgccacgctttccaggtcgggtggcatcaaggcggccatcgggggtggagcggcgttcgcggcgttctcggccgtgatcgacctgtggatacggaaagagcctgcagagtgagtcatccccccccccccccccccccccccggcggggtccagggcggcgcgggccaagagacaacaaaccgaaacccgaatcgaccgagaccaaccacacgagcgagcgagcggcaactatcgtccatctaccacagacccgccgtcgagatctggtctggtctcgtcatgaacgatggacgatcaaggagacgccgaggtcgactctgccacccaaatacatcacccaatcaacccgcgaaagcaacgcacccactctcatgtctacgcacaagccgatggttctcgctcgctcggcttgggaagcgtcttgatcggatgcgatcgtcaacggatttagcagcgatcatccacatacctttcggcatggccaccagatcaccaccaccagcaacaccacgatcatcactcggcgattcgtgacccccacgagaacattcagagggcatcaccattagaaagtagcctcgctcgcccttgaaccacgatccgacgacgacaaccaaacaaccccctcccctacgcatgcacgcattgtaatgacacccaatctcaggacgatgaccacatacccatacacccgtcgtcatcgacatccgaggatggacgccccgcctatcgacccggggatacgctcattacgatttcaaggagccggtacgatcgtccattatagaaaggtccggttccccggacgaacagtctcacggtcgatacccggcaagagcgggcgggatctcaccatcaagggcaaagagagggaaagtaccgggtcggcatcggcaagaaaaccggatccggctgcgggctcggacgatgacgatgggtcagagggatggacgcaggcgaggttggacggatgggtcaaatctacctggatagacggtcgacagcctggtatcgtcggatggcgggacccggatcaacaacgggatagaggacgggtctattgggtgtttgcgctggatgacgaaggggtgcagcgagtggactcgaccatccccgaggatcttctcggtgagtttcccttccgacctgtgtctctcctttgccacgaggtcttgcgagtgacccgaacccagactgatcggatcggatcgtccctttccttcccgctggcataccgtgatcagctactaaaggctcgttcgacctgacgaccctgaccacatgcatgcacggttcatccccccgttgtcccctctgcggcccaaccgggtccatctcctcctgtgtcagacaaccgggacaatctaccagaccgtccgaggtctttgcaggactcgccctagggaccgatcccgcgctggagatggaggtcgaggaaggagggttccccaagctctggacagggctggcagaggctctcatagatcattacgcttgggtcgaagggtggatggtagagaggctggctagcgttcagcagcgacgagaacgtcgacagctccgacgaggaagaggagatcataccgctcacagcccagcggcgggaggagaaggtccgacgatgatcctccgtggaaaggaacatcaatcagggttggacctagaaatacacctgtcgaccagtgaatgggaagacgtctctgaatcgaccggtacggaaaccccgaacgcgtgggatcgaacagagaagaacgaggtcgggaggacgtaccgactatggccctcggaggaacgcgcgaggtatatcaagcggatcgatttggacgaggatgagcgggacgtcgtactccggcggatcgctgatcaggtcgggaacaagacggccgagaggttgagggaggaggacgaatggacgctcttgtggatcagagaggatctgccacgggcgagggatctgggagggacaatcgatggcgggcaaaagggttggtattgcgtctggccgaggggttggttggtccgaccggacgatctcgaagaggactcggtcaggaaggattcgattactaccaagaggcgcgtggagaccagggacgagtccgtttctgttgggccgattaagcctgcagacaccgtcgctcggtttctcgccgcctcccgctcggatacacctccgcaaccgcaacaggaaccccaagagatggatttcgaaatgttgaacgatttggcacctccggccgatgggctgccttccctgtttgacacgcaatcttggttggattacgatccggttctcgacatggcttccgagatggccgacactccggcaacgctcggtgtcccgacaccgttagggaggacagaggcggaccacccagccccgatcaaccacgattctgtcgatgccatctcatccaagatcttgtcccctacggccaacccgaccccggcagctcaacgggattgggacatgatgaatacggcctatgaaatgtcacaaaacgaggacgtgattacggaaaacgatttcaactttttcgacgccccacatacgagtatgtttgatgcgtttgacgaatccaaggaggaaagtatgcgctttgacctgaacaaggatcagggcaagggcccttcgacacagtcggggttcggtgacaaggaggactgggtggagacggccgaggagatgacgaccgagcccgagcctgccccgccgtacacagccgaggcgatcgagccgacgcctcccatcgctgaggtagttcgccctgaaatgccgcttgcgcccatagaagatgcagatatggaggacgaatcggacgacctctttggcgaaaatgaggatgactcggatgagcattctttcgaagcagattcgcgtgccgacttgttggcagcgccagaagacgcgtcgacacgagagccatttggcacctgttcggaacctctgaacgttgccaaacctgctcaggacagggtattggctcctgcacgtcaccagccgaccgtatcagaagcgtcgcttcctgcccaaagaccgtacgattcgatagacgttcgatacatcgtcgacaatgtcgcgagcgatctcgtacccctcgagcataggccactcaagtgggcctcgaagaagaacaagcttctccttcacaacaccaaacgcctcgctatatacctcgtcaaggcgtacggtgacggtactgtcagagaccgcaagggccacaaactcaggcttcgtaaagcgtacgaagcacggcggaggttcagcgcctatgataccgacgatgctcgcaccgacagcaattcggatagtgaacagccagaccaggacgaagatgaagaagaggactggatgcgatacgagaccgatactgcaggcaagcagaaacaccaggtgtctgccgggcctatcaagatcatggaaaaattcgacctctctagatacgcgtggacttgtccgaatatgatggggactgaagcatgtcagcgcccggcctcagtcatgccgacggccgcgtatcctcaggaagttgcactggcctgcacgactgcgatcccttcaataagcgaccgtagtcctgccctcagccaaggttttagagaatggctggctttattggttgtggaagatcctgccctgcgagattgcttgctcggatcgactcgtcctcaggtccgaccgccgcgtagtagagacagtaaagacgttcgcgtgcgtctcgggcattgcggacgttcaactgacatggatggcaactcggttcgcttctggagacaactcggattgacccctttttccggtcaaaaggatgtcagcactcttgtcttttttgattccgcctatgcgagtccgtcagaggcgatggaatggcactctgagctagatcgagcctattccgtgagtcagggatttctgagcgatacaacggcgtcctcttatgctttttgtctgatacaggcgcggggatatggacgctcgttcaagatggacgagttgttttctttcgacactacctttgacttcaggtcgtccggtattcagaccgctttcggtgaggcgaacatcagctctattgccgacgtttgtcaacgactaaacgtcccttatacacctcgtcatcacagacacaatccgcaaaaggcaacttcggcatatccctacagtgatcgtcgttctcctacaggatgaactgtccacgaccttgaccaccttgcaggaactttacgaccaatacgcagccatatacccagcagaaacggcagccaagaccatacttcaacccgctttctttactcatcggaacgactcttcatcgacagaccgactagcatcttgcatataccatcggatttcgacgacgtacaccccacaacaccccactgtatccacaccacctactgtatctttatacgctccagcattcaccctctgctcggcatacacgacacctgcagctcgctttgctgtacaatggcccgccccgacaacaaatcctcacgacactggtcgcttgatccacgctgcgtacaccgtgactccatcgaacgcgctcgttgccgtctgtatggacgaatacggcgaatggtggactttcgattgcattcagctcggaagtggtccgcaggccgtcaaacaagggctcgaaaagttctggcagctagttcaaggctacgctgccaatgctactatcgaacggcgctttgtcatcgctcgattggggcaatgtccgcctcaagagctgcattgtgagtagcccttcgtgaccagttcggcgaatcggtgctaacaagtgttatgtatatcaaaggttggctgtccgttatggaaacgctatctaacatccggccagcccaattcgcactggtacagtgcgtcgcgacaagctttccgtccatgtctggttcaaacaccgctcctcaatggtccaacgtgactggcgataggatcgatttcgcgggacaggcggcgcctgtggtatctgcgggatccttcccctgcggccaaatagacattgggaccggcggtgcagagttctatgagacgcaacatttgctttcatcgacctctgctcagagcacgatctgccagaccgacggcgaaatgttaaaggacgttcagagcaactttgataagctttccaaacttggcagtctgcgatggggattctcgcctagcggacaggtgccgcctcacattgaggctgtgcacttgtaccgtgagctgaatctcgcctagaaaagacgtgcagtatatagccataattgtagcggttctgatcaatatctaatattcgcatactggagtcttgattacatccgtggtgaatgcgcgaaaacaaagcgccgcgatacactcattcgaccgattgagaggtgctagggtgtaccagtagaacgcagagaacagaacacctttcatttcgtttacctcatctcgtggtctggatctttgacacggccagcatagagcgcgagataacgcgactcctcctttgaccacgcccgctgtttcaaacagcgtttcgtagcagtggtccacggatatatatgggggctccaaggccggaccctgtgatcactatctctttgatacaatcaacagtagcggtagagcaaaattgttaaagcgagctggactcgctcagaaacccatctcatctcacaaacactcatcgaaagatagacgctataaatatcagagttatgctgtctcatactcgactcgccaaggtcatccttgccttgatggcaatcaagctcgagcccggccatagcatcccttgcggaggcgcgcctcgaggtcggtggggtcctgtagagaatacagcaagtgcacacgtcggtgatgataggatctgtcacgaaagctgatcgagaacggttttgaaaggctatcggccacccaaatcccgcaggtcaaagaattaccactagcacccatggaggtatgccggcgtaagttgaacttgtcgatatgaagaagattgaaataacgctgatcaaggttggctcttcaggaacactgccactacccgcatcggcgatgacaatccaaaagacactcacgacaaggcggccgatgttccagctgcggatgtcatcattcctacttcggacccggtgcacccttcagccctcactagtgccaactcggcagcagcacccagtaccgccgtcaaagctgctccacccagcgagcccaaagagcccaaaaaccagacgaccccgtcaggaacgggtggccctgggggactgggtatcaatggcgactctggtactacagatcagcttgatgcgttcttaggaggttctataggatggtatgtcatgtatctcatctctcagcacgtgattcgctgagagctcctcttgcaaaggtattataattggagcccggcgcccttgcctgatcagtctccaaccggaatgtgaggccattccgatcacattgcctggaaccataaggtctcgacttacaatgcttccctatagcgagtttgttccgatgctatggggcgatgggccagacaagatcgccgggttcaaccaagcggccaaagatttcgcctcgaatggggtcaaagccgtcttgagttttgatgagcccaacggggcgcacgatgcaggagggggtccgagcatatcccccgcgaatgccgccaaggtgcatatcgacgtcttcaatgagcttgaaggcgtcgaaattggcgcgcctggaaccactcaaggtgcggatgcgtggtgggaggtatgtcggcggagagttccgcccaggctattcgtggtaggcgctcaagcttatgaatcgacactgcaggaatggaccgcagagtgcgagaagctggggggctgcaacttcgatttcgtgccgtttcactggtatggtctggatgctaaagttttcgcaaaagatctggtatattgagtttcaatgacgacaatgcatcatgggaggaggctcatggcagagactttcgatcataggaggcgttcgtggcaggacgcgcgaaaggcaagaaagtctgggtcacagaggtaagaggcgggatctgatgtcgtggagtgcacgttatattacgctgacaatggtctgctccagtgggcgtgtattcagcacatggacgcgaacaacccagtcacaaagttctgctcggccgaagacgcggttccgttcatggacgagacgatcaaggccatcaattcgcaaccttcggtcgagcgatatgcgtggcagggtgctttcgtcaagatggctccggacacgaggagtgggcaagagaaacaacagggaccacagatgatgaacccggatggtagcttgaacgccttgggacagcattacaagacggtctaggaggcgggggtttgccacctcgcgctgaatgtttcctgattcgattacgtaatattttctgaatctcacgagttgtcgtcagcgttcgtcctccagcttcttcgtcactcgcatcgctcactcccatctcgaccctatgaacattgatcatatccatctccgtcgttcctcgtcttgcctcgggttcccaagtctgaagaaatctgcttgccttggtatcatcgccgaccaaatcctttttagaagtactgaacccctcgcaaactttcgtccagtcgtacccagatcgacgccttcagcacaaatctaatctcgcatcggcgaccagcgaaccaaaggtagcaagatcatcatgtcggttgcgacccaatcccagcctcaggccatggatatcgcgggatcctcctctcaaggagctcagagcggtgtcagcggctacagtatcaaggtaggcgatgggtccaagatggaccaagtcgacaaaactacgcacgactaacggttccttgcgcatcttcctggacgtttctccagtcttactacaagaacaagatcgaggctgctgaacttgccatcaacaaacggactcagaacttgcgaagattggaagctcagcgtaatgctctcaacagtcgaggttagttcgggcaagacatggccatggcttccgcctcgatcgtcgacgactgacgagagcgttctgatcgcacgatgacattagtgcgcctgctgagggaggagttgcagctcttgcaagagcccgggtcgtacatcggagaggtcgtcaaggtgatgggcaagaagaaggttctcgtcaaggttcagcccgagggcaaatacggtcagtctccaaaccaaggcttcaacccgaatatatcggcactgacgaacttctttcccgtgatcgcctccagtcgtcgacttttccagcgatattcccctctcggccttgaagcccaacatccgagtggcactccgatccgattcttacctcctccactcgatcctgccctccaaggtcgacccgctcgtttcgctcatgatggtcgaaaaggtgccagactcgacgtacgagatggtcggaggtctggatcaacagatcaaagagatcaaggaagtcatcgagcttcccgtcaaacacccggaactgttcgaagccctgggtatcgctcagcctaaaggagtcttgctttacggtcctcccggcacaggaaagacgttgctcgcccgagccgtggctcatcataccgactgccgctttatcagggtctcgggatccgagctcgtgcaaaagtacatcggtgaaggatccaggatggtcagggagctcttcgtcatggctcgagaacacgcgccgagcatcatctttatggacgagatcgatagtatcggaagtgcgaggggaggcggtggcggtagcggaggtggagactcggaagtccagaggaccatgttggagctcttgaaccagttggatggattcgagcctaccaagaacatcaaggtgggctatcgggcgcgaatgattggaaggctgatcggggccgctgacttcacctcgcgtcgttgtcgaactttaggtcatcatggctaccaaccgtataggtgagtagtcctcatcgcgaccgtgtttatctggcaacaatacttacggcacgtttgctctgttctagatattctcgaccctggtcttttgcgtcctggacgtatcgaccgaaaaatcgagttccctccccccaaccccgaggcccgtgtgaccattctcagaattcatagccgaaaggtcagttggcagaccatgctataccggtgtgccgggctgttggctgatgtgatcatctattccacacggtatagatgtcgcttcagcgaggcatcaacttccgatcgctcgccgagaagatgggacagtgttccggtgccgaggtccgaggtatctgtaccgaggccggtatgtacgctttgcgagagaggaggcagtacgtcgggcaggaagactttgagatggccattgccaaggtgagtcgtgcgggatatagcctgtccgatcggctcgacagaagagagactgattgatgttctcacttcgtttcaactcggcattacaggtcctcaagaagaatgccgagggcaacacctcggtcaacaggctttacaagtagtcatctgcctagcagagggattgataccaaagatgtaaaagcttgtgacgaattaccttatgattaaagaatctagaatccaaagggacgagacctcgtccaggtcgctaggaaagattacgtcatcatgtttctggcttttcggacaattccgaatatgagcaaccaagctgaagtaacgccccaacgaccacggggacacacgtccagcagtccaggctccgactgtcggttcggaatagtcgggatcggttcgagaagaacctcgtcgaatttgaacgtccagccaaagcatcgtcggaacctctcgaacggccgatcatactgttttcccagcactagccgtcacggccgtcaactccagccgcaaactatataggccgatcgcacccggccgttcctgcaaccgccacaccaccattgatcattggcgacctccaaacaatcacaacatgtctctccgaaagaatttcctcacaagggctgcagttgcaactctcatgatgcgacccgccatacgtgccacgatgaagcaagctcgtttagccagtggcatatcgggtgctagtgcacctcctcgaccctgcctcactcaaagcactagggtgagcatgtcccaggaccgacatctcttcaccactacaattcattcttctcaatagacccttgctacgcagtcctacgcggccacccctgccaaaccttacaagacgcatcagcccacatccgtgcccaactctcccttggtgcatagcttctgggacgatcccacatccacctttacgttctgcgtcgtctgtccaaagaccaaagaagcgttcatcatcgatcccgttctcgactttgatctcgcttcaggcaagatcgctcaaagatccgtcaggggtctagcggcgtttacgagggagcaagggtacaaggtcgtcaagatcatcgagacgcatgtgcacgcggatcatctgaccggggccttcgcattgaaacaggcgagtcaaggctcagagcttcgaccagaaaaaaaaccctaagggtccgaatggctgacgtgaggcttcattccacagatcctgcccgaacagccacccatcctcatcggctcacgcgtcatcgaggtccagttccggtttggcaacacctatggcttcaaacctaccgactatcagggcagctttgacggcttcatgctcgacgatgagcctatcgagctgggtgagatgaatggtgtcacgtataatttgcccggacacactccggatagcatggccgtcgctttcggagacgccgtcttcgctggagacagcgtgttcctgtaggtcacattgagttgcctttaatctcgccagacgacatctgctgacgaagcgtgtggttcgattcaggcctgatgtaggcaccgctcgcacggatttccctggtggtagcccggaatcgctttacgcttccatccagaaactctttgatcgttcgggcgaggtccggatcttttcaggcgagtcggatttactatctacttcacggatggcgcgattacagtccgactgatccatcgatttccgcaggccacgactatccttccggccgtgagaaatcttgcgtatccaaagtctctgaccagatggctctgaacaagcacgtaggcgggccaaaagcctcgctcgagacgtttgtcaagatgcgctctgagcgtgacgcgcagttgggtgcgcccaagctgcttcatccgagcttacaagtcaacctgagaggagggaggatgccccgagcagacccggatggccaggtcaggttgaagatcccactggcgggcgatctgcccatgtgaaaggaattgaaacgtaaatgcgtaatagttttcccgttgtatcgagcgtaacaaagccgaacgtaattgtcatgacatgatacaacatccatcatatcacgcgcctgtcccgacctcggtgtcttcggcgtcacccaacatcaacctgacctcgctctcagacagctccaggccgtgtacctttctcacatgtcgcttgacatcgtatacccgaccgaatcgctgttggcatcgctccgtttcgtgaccgatctcgaccgaagcgcagggacaagcgagcgccttgttggccatcttttgtagagcgtgcatgccggtcagtaagctgcctccagtcggctcgaccttggtcgtcggcacggcgaggaatttaggcaagtcggccaccgggccggtcgagtcgggtacaagcgacgattcgcgatgtcgagcggtgatgtgtcgttgcagcaagtgtttgtgtccgtacgtgtttccacactctacatgagggcatgcgaatggtcgaagacctagatgcgccgtcgagtgatgcaccgccagggctcgtttctgtcgtccaccagatccgcatcaggccgcagttcccgcttttcattccagctcacggcgaaactcacggttttgaactgcttgtcacattctggctcgttgcacaaccagtctttgcccacatcgctctcggtccgcttcaatctctttcctcgctcaggttcatcctcgtaatctgaatccggatgccgatcgcgtttcctgccccgggtctcattggatggctcggatgaagcccgtacagtgcgcctgggaggcgaagctgagcgtttgtggaccggaccgaggatgtcaccccggtcgatatggactttgacgtgttccctcaggttcttgctgcttttgaagacccggccctaggtcgtttcgaggggcggatggagcatgaatcagcatgtgatctggagccgggagagatcgcccgcgccacactcacatgacaagtgtgatatggacagacgggcgggtggtccgtcttgatatgattctgcaagtcagaccacctcgagaaggaaggcaagtcgttcacgtgatcctggtgtgaacagatatacctcttggctgtacaagaggtcatcagcatattggtccaccttccgcaaactctcgcacatgaaacgcctcgaactgaccttgatgcaccctcgcgtgtacctttagcctttgggccgtctcgaaatcccagccgcacccagagacaagacatttgaacggtctgaatctgggctcatcctccgctcgaattaggtccccgtcggattcctccccgcttgcattctccgagggtgccggggtctgtcgtttcttgatcaccctcttcggggtggacgctcgggtctcggacaggagggcctcccgatgttgatcgaggacgtgtgcccggagtttggtatgcttgtgaaaagtcgacgagcaatgtgggcacttgacagacagacaatcaacatcggtgaacgtatcagcggagttatcttatccggtccttcatgatgagcgcagactcacatcgaacctcttccccttccctatcggaccacccgcatcaccctcagcgacccctctatcgtctctatgtagtccctcatgcctgatcaatttttcccgggtccagaaccgtttcccacactccgagcatccgaattccttcgactcggggtctttgtgcgtgaggaggtggcgctgaaggtgattgagcctggtatacgagcaagagcacccggggtgggagcaggtaaacgggcgctgagatcgatcaaacagggtataagttatcggtaagcttgatctgcaggtcaagtcgatgaaaggcggaaggcaatgcagagcggactcacttcacctgtatgggagagggcgtgttctttcaatttggcaggtttggaaaaggctttgccgcacccctccgcctcgcagatataacgtttcccgacagccaaagatggttcccgtgcacgagactgtgatctcgattgggctggtgttcgcggttgggattggggtcgggatctcgattgtgatcttgatcggggattgttacctctttgtacagagccaccttggggttcttcggggttgtagtccgagtcgtcgtccgtgtgttcatctagactctgctcatctgctatgacagggtatgcattttccgaaggatttttcgatcgggtccttgtctttctttcttgtccgagtcgttgtggggttgtcgaaggtccagcctgaggagcaactgcgtcccgtcgaaatccagggacgtcgtcccaaggaaagacggccaagctgtcatcagcagcacctggctgaaaattcgacgggagcgaggtcagttgggagagtatgatcatcacgacgttagattgtggcttgggtcataggcagattgatgcagcggtatgttttgaaagtccaagatgtttaatccagtttgatcttgtcggacgaccccgaagatagtgtactgatcaacatcatctttttccttcctaccggaagttattttgctcattttagcatccgaccacaagatgccgtcatgaatttcggaagcttttgcgggaatttatatccgcgtcgcccctttgcgactgatcgcttgcgtgtacaacgaacgaacaaacgaacgaaatccgataacttgtatgctcaagcgacttggttcgatatatccccatcgcctcataagagatacgaccctggacgactacaagataacatacgagcagactactatagcatggatcaattactcagacagatgggaggtggtggaggaatgggcggaatgggaggtcctcccgcaggggacggcacggtagctgacaagtaagcatcgattcgaccgcaacaatcacctttgcaatctcaatcgaatgcaagctgatgtaagtcttgctcgtacgatagcgccgagactattcacatttcttctttggctttgctcaaggtatgctctcccgttctagctgtagtaatcggtgtatcaagtttagctgacacgaatatgatggaacgatgtagatgctcaagcacggccgagcaggtgaggatcagctttctttcctcgatcaagagttcggacctcatcttcgtagccaggatattgaccgctgtcgattctttcaggtgtaccgatggaagtcatgggcttgatgttgggagagttcattgatgcgacaaccgtgagtctccccgccacatctcccatccttcattccgctcatccgagttgtacgaccgattcgtccgctgatctcgtttgttgcctctcttcgtccatgcgtcagatctcctgcgtagacgtcttcgccatgccccaatctggaacctcggtcacggtcgaatccgtggatcacgtctttcagaccaagatgctcgacatgctcaaacagacgggaagacccgagatggtcgtcggatggtaccattcccaccctggattcggatgttggttgagtaacgtcgatgtcaacacccaacaggtgagccaggcgtccgtttcgatgccggggagggaaaggagccgaacgagtcgctcacccctctcccgcacgatcacgccgtagtcgttcgaacaactcaaccctcgagctgtagccgtcgtcatcgatcccatccaatccgtccgtggaaaagtcgtcatcgacgctttcaggaccatccccccaaccagtatcatgtcgggacaagaacctcgacagacgacgagcaacgtcggccacctgaacaagcctagtatacaggcattggtacataacctcaataggcagtattacagtgagtctcgctgcgatgtcacgatcaattcgggcatcgagaggtggtataatgtagcgaggaccgcaagaaagaatcgcggctgaccaccgcgcccgacgctccgccctcgcaggtatcaacattgattacaggaaatcagaggccgaacagggaatgttgatgaacctgcataagaagggatggaccgaggggttgaagttgaccgatttcgagaagcatcacgagggcaacgaggagagtgtcaaggttagtattgcacctgcggctctgagcttatgagcagcgcaccaccagagactatacggggatatgagcactgacatggcacacggttcggcccttcgcaggaaatgttgaacctcgcgcagcagtacaacaagtcgatcgttgaagaggccacgttgaccccggaagaactcaagatcaggcacgtagggaaacaagatcccaaacggcatctgggggatgccgtggaaaaggccatgggcaagcaggtggtacagagtttgggaatgggcgtgctgagcgaggtgagttcatcagtcctgcgatcagttgtggtgacagcgggatagctgatttttggtcggacggatcggttatgctatagctgtgagcggtactcgtacatcaacagatgtagcaatttttatgaagatacaatcgggttttggacattatgcatcgcatcgtcttcgacggtgactggccgatatcagttcagcatagtcgctggacggaaatatgagcgcgccgtggagaaatgcatcgttcagacatcgaacgcgctcaccagaaacgaaacgacgatatagcgtggagacttaaaggcgtttcaatctctcttctgcgacagggtttcgactctttgtccctggcagatggtggtacgtcggcataataatgacgatcctgactggtctcggtccaaggcgcatcgggagatcagggggtctgcgcttagaagcgcctggataaggaggcccagttgcgttatgaggggttgttctaaacagaagagacaaaggaattccggctgaagcttaaaatgtttgtatcagccttaaacgactccttcaaatcctgcgctttaccgcaaacgcgagagatggcaagggctgactttgacttgccctgaaacagacaaaatcctttaagtcagtactgagatccctcgcagccggacgagtcttggtttcagaaaatcacatagaacatgcagataaaaggaccgttcagtgcttggacttactcaagccgggtacaacaaaggggatccggagatgaaagggggaactttgtagcccttacaaagtcatatatagatattttctgggaactctcctccagttggctaacccattccgcttgttagaatattcgaaacagcttcaatccttgacttgagtgatcatcacactgaaggatgaagctattcatttccaccttgattcccctgctagccttgccgtcaatcgctcgcgctgctggagcgtgtcccgacgtgactaatcccgactcaggccaagggtttgccgccttccgatgggcaacattgaatttcaatgtgatctcgactgagaaggattcggcgagtgctggtcccagtgtgaatcaaccttgtctgtcacgtgaagctgacggttctccatggtcgaaacatattaggcccaggtccccgaagcgggaacgagcctgatcgagtgcgccaagaggtgctggcagcgaggtccaggcaagttctccgtacgttccgaccaacataacccctgacatcttcgctctcgaaaccccagattgttacgccgccgccttcgtcgacgatattcgcctgatgccacctgatggtcaagggcaaggacaacgatgcgtattttatttaagaggagagcctgccgatgtctcgtcaaccgcctctacgcccgatattcctttccaaggaatcgccctgaaaggcacctgtggtgacgaactcagcaccaggatgatgcaaggcaagtacacagtccgcgaccagaagtttcagaaacgtgaaacatgaccattattaaacattgcggcatctttcagggaacaaattgcttgagtgttgcaacatctggcagtgatggtcaacaagctgtcgccatgttttttcacgtcttatttgtagtagtgttagtgcaggtgatctacctcgtgccatagacaccatgtatagaccatttacctgccgctggactctgaggtcatattccaccgagtatggccacgatcgttgttggggtcctcaggccgcagcttgtgggttccgtcgcgacattcttaaggccttctgtcgtggattgtcgctccaagataacctttcttgttttatcgcgcgccatgattgtgaaccataccatgcgccgtcagattaccggcgaaattgtcgcctgtcagtacttatacagcaagatgtcttcggcgtacagcgtgagctgtctaagattcgctgatcgaaacgcacaagcacgacgtgatacttaatgtaacatcattgcgtttgggtgctttgggtgacgccttgctgatgtctagtgggagtccatcaagaggctttcggtagtgtgtcgcaagcgcttcaggtttcgtttccttcatctgtgtccttgagtggaatacaaaggaagtcacacccacccttttcgtttcaggatatcttgcgcatctagatccgtgatcttcatcaccgatatgtttacggggcaatggcagggtagaaacggttgcggtcgtcaaggggccaatcttgaaacatgctgcttcctccttcgctcgtcatgtagcttgaaaatcaaagccagatgcacaagttatgactgagcatgacaaaggggtagaaacgttcgtacaaagggcagttcagtctgatgtactactgatacgtataagagggtgttgcgaagggaggcaggtccatcttttgcttctacccttcatcttgtttcgtgcttgaaaatttctgtctccgtttagatcacaacgctactgatcatcttcgcactggtcaccgagacccaagcgcaactgatagagcgcctcgcaaagcttgtccattggtgcgacggtgcgcctgtcaagcagactgacccgacttttgcggcattccgttgggcgtacggagagttcaaatccgggatcggaggatatgtgaggagtctctatgcttagtcaatctgtaaggaagtatctcaagttccatacctttcataggataccacgtgggtttcatccaaaagtctgatcgattgcgcgaatatatgttcggaccgcggcgatggtcagtcgagactgtctgccatcaacatcaacgttattatcattctctgacggatgaatacatttatccaatactggtggttcaacaagcaggttgtattggcgtcaatcatgtctacaaatctcaatcggacggacaacaaacctgtcagatcatcacctccggctggtttccttcagcccgaaccgaggcgtctacggcggagattccgttccaagggacggcaagaaagggctcgtgcgaggatgcagatagtaacaacgctatgaacagtcagtatatttacggtgtatttgcgtcgaggaagttgatcaagcggtcctgattgtgccgcgacgttacagataatcccgcgctcgagtgctgcagcatttgatgggctgcgaacgggtggacgactcacaaatcctggattagtcggctgccatctgacgagcgtctgggacgctgccttcagacgctctgattatccacgtgccacgtgcagatcgcgatgtcatattccggacagtgtttccctatacaattaattcgcgtgaattcgtttcctttcccatcacttaattattattatagccacaaagcccaacagcttccattccgctgcctgaaatgtttcagaaagagttagatgcagtttccccgctgggagtctgaaatggatcaatgctcacatcagaacccagcacacgccttgagaacgaccaaggagaagatcccggcgacggccaagctcgagaatcgtgtcgcagcagattgttgagcgccgttggtgttgagttgacgggacatcgagggatagtcgaacgaattgcctccagaatagtttccagacagttcgcatcgccacacgtcagagttgactttgatgtcctccgtgtagatgccggggttattcgccgggatgacagtacggttgtagcattcggcgaacacggtcacaagtgcgggttgcgtgttatagtggtcattgtagacggccgtatccggaagcatacaccattgggagatgccacgcgagtctgtagcgttgtccgacggggggttgctgtcttcgtcagacgagatgaatgtgccgttcagactcgtacagcagacgtcgaggagagtcgcgttattgctgatacagcccaagtgggtcgtgttgtcaccaccgcggcccggtcgattgtacgggaaaaagttcagtccccaagagatgttctgggatagtgtggagtattgcccagtatccccaggcttaggtatggatccgtggatgtaggtcgcgttgagattcgccatgttacctgcgagcttgtggttgaaagagtaggaagatgtgacgtgcctctcatcatgctgccctgcatcgtctgttcgaccgccttccctatatatactactgcagccacacgcctcgtcgtacacaactctccggtccttcagctcaggacaaaacaaggttgccctcgtcgataatgttgccgaggccaggtaccgatagagttcgccttgttgacgccatgctcgggctcgagcggttccgacgcgcgacagccaggaggttgataattcgtatcacccggagatatcccgctgctgcgtcaaggtttaagccagcggcggtcaaacgggaccggatagatcgctggcaagcgtggactcgcatggtcgacttcggtcagaagcagtggtatcgtggctccagccggccggctcgcaactgccgctagctgtgctggtcccgttagatcgtcagatgaccatcggacccggcgttggtcgtttgcggcacattcgaggacggcctttctcgaggtgtcacaaaatggcaccggaacgctggatatcgggtcagctgcaggctcgcagatgaggtctgttgggcccggtactattagacaaacgcctatcgcgatacaggctttgcacggccaagtcctccggcctgcctgtgagcaggcaactgcctcgactcccgccgtctccgccaaacagctacgagttcaaatcacaaagttcgaatggggcaaccgtttaattccgaaatcatatcacgagtcgttgcgtgaatacgtgatccaggtatcgccccgtcgtcgtccgtatgggctgtccgactcgataaggtatcgaccttgaagcagagcgtcggcgtatttgaggactggagtttgggcagttcgggaagatatgtcgtagcgtcgcctgcaaaggatgggagcgctgctactatcgaaccctctgaacaatggtcactgttgaacgtttggatcgtcccgacttgctataataatttcgggcggcttgaacatggacatacatatgcccggaaagaaacaaccgaaactgactacggatgaaccaataaccgaatgatggtatatcgcaggcaactgctcacagacatcatcatcatcaaaagctcccactttgattgatcaggcgtgccatcggagagcctatcaggcgggtcagctcggcgtcacgcaagctcgatttcgagatcccgattggtttggccgcctagacacagaattcgagcttgtttcatgacaggcattctgacgtatggtaacgtatatctcacacatgctataggatgtggctcgatcgcatgtcgttcgtgggggacgacaacgccctgatacacgtagatgtctgaaaatgcttttggttgactgagcttatggcaggtggtatgatgatacatctattgtacgaccgactcgacctcgacaagagacctccaggctggtctttgcacgagcccggtctggtccgcttttgttaattccccctgaggggggctcgtaattccgctcttcatgcgtatgcgaagctcttttccaggtcccgactgtcgtaccccgtcttccaagtcgttcccctgccttcttcgtcttgcaactcggacccgtcctttcagtccttgttgaacttgaaagtcatctggtacgcgctctccccgtccgcatctaccgaatcgtaccggacgatcagccaaaccacctctctctcttctagaactccctctcggcttagaacgaagactcacagtaacccttttccaccccggtctgctcgaaccccaagttatccttgtacagcgagatggcgggcttgttcgactccctcacatggagagtgatatggtgtgctttgtaaagatggttcatcgcatgttctaccggaccgtgcatcggacgttcatgcgaggtgagaaacccaggtcaggatcgtaggaacaaggtgaaaggccactggaaatgtttagcgagggcttacggctctgacgcatgagtttggcggctagtccgaggcggcggtatgttcggaggaccgagatggaggtgacgtggccggcggggatctcggtgttctcttcgtccctgtagacagcgtcgtcgtcgtcgtcgtcgtcgtcatcacagagtggaatgtggtcgaggtcgaagtgcaaagtgaatccgatcagctcgctcgtcaccaatgaagagagaagccgacgatcgccgcacttacattttagcgaggatgtaaccgacgacttccccctttgggttgacggccacatagctaagctctggccatgtcatcgcatgatacaggtctgtcccgcatccacagtccacgtccaacatgcgttagctttgctcggaacgcgcatagctacggacagagagtgaacttgagcggggactgacagtacttgaatgtataattttcaggaaggttgaagaggttggtcttctgcatacccagcaggtcgttgacctggtattccggggtaggtcgatgatgagcaggttcagcctggggttgcggaatggtcgaggtcgagaaaggtatacttacggtggcttgtcggatgttcatcttggtagcagtcaggtttgtttatttactaaaccagctagtcgttccaaggcttgtgtataggtgtctggtagaatacatcttgatatatgcccacctgaacatgatcgggaggttgatcgaatgcatatgctatgggtatcggatcgtcaaagtgttcaaaggtggaaacaaacgagcaagcacacgctcgagcttacgtacaatccagctttatccgcgtttcctctaatttccaccttttcaaccaatctcactacctcactcgcatcgcgtacgggagaacaaggtcgagacatatctcatcgaggtaatcatggtcggtacaagccattgaactcccatctcaaaggtcgaactagccatgaaccgagatatccatgtttaatcgacccatcgttaccagagacccaaacgtcatcgcctcaacctcatccggacagtcccgcaggatgatcccactcgcgcccctccctcttccacctttccaaccggctcccatcccagcgatcttccccaaagaccccgtcgaccccgtcgtagccgcagaacaggaaaagatcagacaagaactcgattccagattagcgagatggtcaggaccggcagagaaattgagcacgccagtggaaaaggagagcgggatcccagggagcgggtggtggttagacgatctcggaccgagcggggtcaaccatgattggcagagcatggcgtttgacatcttgtccaaactgaggagatacaaggacgtctagtgagtccgacgacaatgcacgtttggcgcatcgtgtgcgtcgttgatggccgtctctgtcgattcgtagcggagctcggccggccgatactctggacattatccccgagaacgcacgggtgccgtacatctcattcaacgtgaatctagctactgccgcacgacacgacccacctcgagcgctaacatccggctttgctactctccagcaccccatttcgctccgcacaatcgaagctgcgctcagctcgggcgcgttcattgccccgaaatactttgacatggagatgatgcgtctctttgaacgcgcccgtcgatggttcggcgccaacccacgggatacgctctcttacggccagacgatcgctctgcaaaggttataccacgccttgacgtccacttacgagagccccaacgtcccctataccaacaccatgccccctctccccctcccctcggcttcctcccactcgttcatccccgccggaccgggactggcccgaccgacacccgatagcggcaagcacaattacgaagcgtacgagtttaccgggttgaggatcgtcaccaaggataggacggcgacgagcgaggcgaggtggaaaggtatgggatacaagacgggggattacgttcatctcgtcaacccggaggatccgagtagaccgatcatcgggcagatctttaggagttttgtacctgccaagtgagtcgttggtggtcgtccagacaccgctcgcgttcgtctgtgactgatgaagttcatccatctcccctcccgcccccttctcgaaccttttatcactcccccccgcgtacgcgcgccccgtccaaagaggcccgaaacaacattggatcaccgtctgctggtattaccgcccggaacagacgtggcacaaccccatgcagatgttttacgacaaggagatctgcaagacggggatcatggtcgaacatcccgtcgaggatatcatcgagcgtgtagggtgtcagttttatacaaaggcgagtggttacagcgtgggtccggtcgggaggttggagctgatggtcgacgttgacgatggtagtacgcaagaggaagaccgcaagctggggaatggtacccaggttggcccttgtgtaagcagcacccctttttcgcacggaaagtgatcgtcgggcactgaccgcccgactcgattgtcactctcctggtagatatctgcaattcgaggtacaacgaggatagacgtggagaggagagggggaatcattttgtcaagatcaagaattgggggtcttgcgtgcccgaggcgagtcggccgtgcgtttcgagggcgatagctggatgttgctcataccaagatactggaccgtccgggcctggtaggaattacgcaagacgaatttcatgcagatcgtcgagtttgagcgcacgccgcatcatcttcggatggatccttctccgtttttacgcgggttatccatgggcgtacgtgggatcccgggaggtatctcgtgggacgtcaagatcgagggtcaggacgacgggacttcgggttcggggggagtcaagatgacgagcagtgtgggcaacgaacgggatccggttgacgagggaagtgattcgaaacgaccccggttgatggggccgggtgcgggcgcggcgttgatgggcgagatgagcctcgcgggggccatggcgcttgcgggtggggtcggaccgaacgtggcggggtcgtccaacgtttccacgcccggagcggggaggagcagggatgcgtctttggtacccccaactgtggggtcgatgagcccggccccgatcccagtcgtacagccagggatggccgtggtacccagggtggagacaggaggagccccgacggcgatcacgccgcacgcaggacctgcatcgaggggccgtccatcaaacagtgagtccacggctgggcgatgtccatactcgtcgtcttgctgatttggacgcatgtggcgtgttcattgcagacaatacgcccagccgatcgtccaccaacgtcccacccgcccagcactcgcccgccccgatgaaaccgctaggtccacctatccccttgcctgcaggatcgttgatccatgccaagacgttgccggatttgtacggaagcgtggacgcgttgaatcgatggtgcgacgtcgaggcgttaccccttcagaccggtgagtcgtgttcctccataagacggggcgacttatgttcgtcctcgtacgcgacgacgctgacggctgacgtttgttctttcggcgcgatctcgggggcatccgaccaggttcgttattcgagagggatccgcagtcgaacaaggtactctggttctctggtccaccaatcgatatcgatcagccggaagcgccgagccattcggcgaaatacttgacctttttggcgagacgcaagttgggcgatcaggcgggttcgacgacgacgacggcgacgacgatgacggcggcgggaaagcgggaggattcgttggtggatggggaagagaaggggttacaagaggggggtctgtgggggaaagaaaaggagttggaagagttgttgtatggaagtgtatgatggggacggcgacgacgacgacgtgagaggatggtggtggtggagggttgtattagatgaggaacacgacgacgacgacgatgatgtacgatgacgaatctcgatatttgcttccgccatctgtggctgtcccgactgctcaatttgcttccgttccctgtcaatgctcaatcaaagtggattccccggattcgcctcgtcgatgatgtcgatgttgatggtgagatatcgttcttgtagggtcacactgttctacaactcgtcacctcaagtctgcctcgtatcgagaactgcttgccagcagcttctgaagtcgacatcaacctgcactagctacagcaagactcgaacaagactgatcgacaaaggggaacgccgaaacctcgtctcttctcgtctctctaccccgcatcaacctcgtaacaatccacttatctaccattttcagcgacatcgccaccttccatcgaccctgttgaacaactcatggatgaacgtgcaacagcgtcaacatggaatcctcgacggacgactttggtgtccagagcttgagggatagtatgctacaaagcgaggtgcaagaggacgcaaggttgagcagtagcccaaaggagtttgaagccccgggtaggctcgatatgtcgaagagtgaccatcatcagcaacaccaagaatcacaatcacaatcgcggttgcaagcacacaccaatcgcgggagacaggacagcgagatcagttcttcctcgggaaccgtgctcggcacgaaccgtccaagccatatcgcccttgacctatccaccctcgacccgctccagttctcggccatcgtcgacccggccaatgacacgatcgagaaggccgattcccgggccccattcagatcgccgaggacgcctcctcgagcttctcgttcgcagacccggatgtccaccccgccagatctgcactcgcacgcccagcaacaggggtacgaccgtaacccgaatggagggatgaactttggccattcatacccctcgccgaactcgtccacgttttccatccattcctcattcatcagcgtctcctctctctccaggggatcttcgcctttcgaagccccttcggcaggagggacggacacgcccgcggattcggaccgagagaccgggatgcactcccgggagagggaaagagaggcgaggacgagcccggttcgaccttccccagctgcagatcccgacgtctctttggtcctcccgaacatctctctcccaggctctctacacccatcgaggaaggatgcaccggggtcccccgtgagacccgacccgtacacgacgatgagggacagctcgaccaccccacacgctttccgggtcttgcccgtgctcggtccgagaccaaagggaaggagaggaccgttgaatatcgccttgacggggagagcggggtcgacgagggcgttcttgtcggctctgataggttgtcccgaggtgatgtgttgtcgcgtgaataggcaggcgagcgaggccgggaaagccggggagaccgggtgtgagattgccgtcttcgagacgtcatcggaagggaacgggttagaagatgacaagagcaagctggtagctcgtctgaccgtcttcgatcacggcgtaggcccgctcgatcaggtgagcggataaatgcgttgcaccggcccatctcccgtgcactgcttatcgtccatcgttcatgccgaacagaccctcagcgcggtggaagcgtcgtatacccgacttaataggcttttacggcaagacggtggtattagcccgtcgtcttccgatttcgagagagatacggatcggctcgtagcgagctggatcgagagtaggaaacgatcagagatcgatgtgcagagagcagagccaggtggtatttggtatgactttgtcatcgtcaccggggagaggcgatatctgctcgatcaaggcaagtcggcggcggatggtcaggacaaagggtaaagctgattgcttaacggtctgacaattttgacaggatacgagacgctggtacacctgatgtctgtggtcccggctgtttgttggccatcggaactccaagacggtctggcgagacacctaccattgccctttttccggttaaaggcatcagaaggtaagcttagagtcgatatactcgactatattggcatgacctgatttgaccattcatgatccgcagccgcggatcaccggtcgcatggcgcatcgccagatcctactccccgctgtcaggccaattcaaacaggatcgacagttacttttcccagccgcaagaagtgtcgacgacggatgacgtgattcgaggactcgtggacttgctgacgatggacgcctacacaagaacgccagatcggcagacgctttcccgccacaacctcagcagcgttagcgttcagcactttgtggcttggcaacgcggcctcgctctttcaggtgccgggctggccaggtctcaagcgagggctgttgattccggagtggaaggagcgtcgccagaacgttcgccgacgacaccatcacggtattcctacgcaccgaagagaaaccgtccagcggcgccaaatgaatgggaagcgggtctaagccgacgtcatgctttacgaaaacgaaacgagatgaaacaacacaagaagaagcgtagcgtcgctcgtacacgcgagggtaaaccaaccgcgagagatggcttttgggaggcggcttcgtcatcgacggggacgtcgagtcccgtgtcggaagttacgatacgtgggtctgggcatccggtcagacgagctatggcagccgtcatggacagctggagatccgccacggatgatacacgggtgcgaatacagaacccttggagatggatagggtggacttgctttggtctcgctgctggatttggatgtgtcatgttgatgaaggggtggaaggacgtggcgggtagactgtgatatttaggacttgagaaatagttgtatgcaaatttgtatcgcttgacccggaccattgtattgcacacggctgtctacattttgctatgaccctgagtggaaaactagccatgccctcacaaagcctcgccaatgctcatgcgggactagttttttggacttttcccggctgtggtcttgtgttgtacagaatcctttccacagtctccgaagctatcgcatggtgcacatcggtattggtcttcctagaccgaatcgcctcggctaatctgaggacgaaatcccctttgttgtgctgctcatgccaggtgattgcacatctcagcgagaggtagctttcaatttgatgtaaaacctgtgtcgaaggtttggcgaagtgcacagcgagaggaccgaacaaggggacaagtctaagaaatcgtatcgtcagcaagaatcgtctctattgctggaaagaggtggtagggaattcacgccgtcaaggccgtccgcaggtagataccaatagccttcatgaccatgctacgaggcagatctatccgatgattgccaacttcatgagcgacgagatgtctgatctgccggaaattcgactcactcaacaaccatattttacgtattaccaaccaaacgacgattaagcctgtcgcgatcgggccgacaacaggaataagagcaattttcgcatgtagtcctatctcatccatgattgatactccccgcctgagccgtctcaaaatgtcgttgtggtcttccgagagaccgtgcaccggcctgtcccgtacagaagccgtcttcttgatcttttcaacgtctcgcctttgaagatcattgtagagcgcaaattgatggtggtcccgcttcttttgtagaaacggacgagccttgtggcgctgagtagctgtggaatggctgaggacaagcatttcttctatttcagctggtcctggctatcggacgcccatgtctaagttcgagtatcgagaacagtaacactccataattgatcgactcactgcttttcctgggccgaagtgccggattttacaggcccgcctcacgtcctgcatcaagggcgggtcatccttgtagaaaagaggataggggaattcatggtaccggcttgctgcgaagatacaaaaaatgccaagaatggccttgaagaatcccatgttcttgatagtctcgtttcgatcagataaagccccatcgtcgccctggtacccgcttcgtcatgtcatgtcaacgtcttattgactccagaaaatcgacggattgaaacgtgggggggtgacgatcaaaggaggtcgtgaaacctgaaacacagtaggaccctcatgaaaccgccctgagccagacttgcgacactcaagctaagaggtatgttctgacttcaggccctccgttatcccgctcaggttgtgcatcattccccgcgtttttgctgttgcttcccgtttcccctgtcttaggtcacgcttgcttgtacgacgatccccctgaggtcatttgaccgaagctcccaatggtacctgacggtgggttcttcccgcttattcatccgcgcgtaatcctgattcagcgatcaccgggatgcatcccttgctgggctaccgcccctaaacgctactcaaatactggacgtgttcgattgtcctcgggaaagttgaacgatggctcccgccgcggagtccccagtgagataaggtctcacgacagctgaattcggggcgtttcggaggcaattatcttgccaaaccctctgggcatgggtgtcgacgaattatcgaagctgaacgggaccctatagctttcgatgtattgcacccaacgccatagtgatgcggtgttatgaacgggccgcacagtctagtggtgatcacccggacagcaatctttcgaaagcctcaattcgttctggtagagtggagctaaagaaacacgcctcttttaccagctggagacgagaggatatcgatctgttaccaaagggattacgatagccaggaacaaggttctcttccgacgtaggttcccgtatcagagtgagggagggccggcacgaattggcggaggaggagcagatggcgcagaacgttcgttgagaatcagaagactcacatcatggtgagttaggcggttgagtgcaacctcttcgggctggggtccgatcgacaatcagcacaatctattgctgctgctatgcgtacgcaacaatatacattgtcgagggaccgaggatgttcattggaataggatacaagagaccttcgcattcctcattacctgatgaccttttctgagactagctcgcccagctcgacctatccctgcaacaatcggtcgcacgcccgaatttagccaatgttccgggggccagagcagagtatgtccctgcagttcatcttctgtggtccgaatatattgaagtacatcagcctccggggcttgatttatgtttacgcgcaaggacagtggataagctcgtcggttcagctttcaaatcaggcactgtacgctgtgactgttgacgccttgagaaaccttgaacgagcgaacgttttccgggcggtctcacaccgtgagtcgcctgcacatgacacggtccgtacgggcagccacccccaaataggctcccaggcgcctccggcttttgcttccgaacgaaccgcaacgtcaattgacttgcaatcatctatggttctagaacaagtcttcgagagggaatgcttcgggtcatggtcggctcgtatgttgcgacgcacacgggtgcctgacgaccctttgggatccaggtcgactctcagatcgaatgacctcttcaaaggcacaacgataccctgttcgcgatggtcacgagccaggaacccagaaaccccggcgggcgatgactatcctaaaacttcctttatcaaaggacgaatatgaccagatacatcttgctaccggtgatacggatcgaaccatatataagcccgaccatgcccagattttctcgtacggtcagtttgcctatcatctcgaccacatacagtcatccgggccccatcactcataaccatcgccttatgtccaacgaagtcttcatcacgaccggagttcaggctcaaaggtcgtctcctcgactgaacatcatctctctccaacagaatgagaagcagttctccctcttcgttcaggcgctcagtgagtggatcatcgacggcttgctatcgacatcctgtgctctaaggtctcacatcctcgacctccctcccttctagccgaaatcaagatgttgccgtcctccgtcctcttgtctcattatcaagtcgctggtatccacggtctgcctcaacatccctgggacgacgtccctcagaccgtcaccgacccggcttatggttattgccaccacggactgcaaacgttcccgacttggcataggccttacgtggctttgtacgaagtaggtaaaagcgtcgcgactaaggcctggcggtgctgatgtctgtcttgacgcgttcgtagcaaatcgttcacgataattctcgggatctcgcggagtcctatcagaccgatgacaagtcagaatggctcgaagctgcagagaccctccgattcccgtaagtcgcacgaccgagttgtgcacctgcccgtacacatgtcatcttcatcttgtttcaggtactgggactggtcgtccggtcaaaacgttccgagcgtcctcatttccgatcccacggtcaccattcgacgagcgcctaaaggagaggcaatgacggactatccaaaccccttcctgagctacaccttccaacaagaaggggatattcccgcctggcagtatcgattcaagaacacggtccgtttcgccgatgtagccgggaccgagccgaagagtaatcccaaggcacttattgcgtgagtcgtaaaggtgctgtgaaatgcagcgctgtcggtccaacccgacccgttcccacgcaaaggtattggtccacagtcaaagacacgctagccaaggatgttcgtgatacgctgtccactcaaggtctgagctggtacgatttctccaatcatacgactggaaacacggtccccggagccaatagtatcgagaccttgcacgatcggctacacgtatacttcggacagggtagaggggctcggaccggtcatatggccgacccgtccgtggcaggtatgtcatttgcccgtaaaagctgacagaagccgaatctgcggctgaggagcgctacagcctttgacccggtgttcttcctacatcattgtaacgttgatcggatcctcctcaattggcaacgacttaacccgaacgtctgggtcgaacaaggaaccctcgcggccaacgggccaaccacgttgacggaggacgttgggtcaatccagagcgcaacgtcgagtgagctacccctgggtttataagccattgacggatggtcattctaatatatctccatgcgccagacttgactcccttctggcgcactcagaccagcttctggacttccgacgcttgccgagacacgaacgcttccctcaagtattcgtacgaccgacttccgacggatcaagcttcgttctctctctttgccgagcaaaacgtgagggccattccgatgtccaagttgtcctctgctggtatcaaagcgacatctaagcaggcgcctctcggggtcaggatgaggtcgagcggtccaaacggacaggaccgatccggcggtgatccgagcggtgatccaaacaaagagtcgactgaacgagttcctcagtccttgctgcacaacaacaacgccagagaagatattgcgcaggacctgactcttgatttcggacctgaaattcctcaaggtccgatccgagctccacaagcgatcttgtataagaaatggtctgtccgtgtccgggttgacaaggaatgtctcggccaaagcttcgccgttgaggtctacctcttgcaagaccccgagaccacgaacccgaacgaggacgattttgctggagatttttggacgttcgtcaatagcaggtctaggtcttgcgagaattgtaatgctcagagggaggccggtctgacagtcgagggatacgttgatgtaggcatggaccgcgttcaagatccacggagagcgaacgtacctcgttaacccatacttacttccagttgaccgaaatgttacaccgacggctcgaggtcaacccgaacgaaagccaggtcaaggagtacatccaagatcacctcttgtggcatgtcatcgtcgtaagtttccctttcccccagcgtaaactcgcaaagtaaatcctcaggtcttcccctggtgcgacagaacggcacggtcatacccccgacggacccaagggtggccagcttgcaaatttccatcgtctctgccaacgcaagggtactcctgggtgacatccgagatgatgaagggctgacgcgtcctcctctggtcatcgaagcccctcacgaacatgtccgactatccggacgtatcaatgagaggtgtcttgcgaggtggtgatcgccgggcagtagggctgcatacgaacaagagctcatggcatcgcgaattcggcaaagggcggcgatgagggactaattattgtcagacgactgaatccggatccttgaagtagaattgttcatcatctgaaagtcgttgcggtcgtggtcttgaatttaggtatcaaactgtcgattcgtgtatggtcaaaaccacctaagctaatgatcctcagtgataacatccagtgctccagtgatatgattgttgaagttggtcccgtgtggtctgttttgctgtatcgagcttcagtaggaagatggtggcccggaccgttgcccaagcaaagcgtcgatatctatcgagaacggcttgccagggcccgacccggtatgtgagtgtgcaaggagtgcgatgcttgacgtgatgatatgcagattgtccccagtcggcttgatcaaacgttcagcgtaggataccgattatcttgtccgacggagattgaggcagccttgagccgttaggatcatgaaatgacgagatcgtggatagttgcgagtcacgacattgaagtcgatgcaacctgacgcatggatatcgacgcacgggtcatacctgcaaccaaggcatatttgctgttgtttccgtttacgggttctgtccggtattggcaaggtgaaaggcgaaagatcgtgttgacaaggtgatcgtccatgtcagcatcgagtaagtccgggtctagatggatgatttcatgagatcaaatatacgtttttgaccgcagattacgtaagactgcagtcaacttgaccggtcgatgtcttttataaacaagctcacctcgatcttgctgtattgttgtgattcaattctatataacgcattatacggcactattagaccctcacgagggcgagtggcagccacgagtagttgcgactgcccaagcaagaaagcatgtgcgatgtcacagatccatccaggtatagttacaactgaacgggtgccgagctgaaaccaccttacaaacacgttcacatacgaagttacaagatacaaacgagaccaagaaagaacgttatgagcgctgaagtttattcctcttcgtcgtcgttctcatcgtcatcgtcgtcctcaatcgggaaatcgcccttgatgtaaggggtcccaggtctggtcgtgtattttcgctgcgcgacttccaattcatcgtcatcgttcagcggcgagatcaccctaaccttcatttgaggcgaatctagtggcgcggcttcgggactttgtacctcgctgactgtgatggtgggaatcgagctatccggtgggcattcgatcatcatcgtttgatctatgtttaaccggttcggagcgtgtttggtcattcgaggcagggccatgatggcgatgattgcaaaaagaaggtcgatcgataggtaaaaagcttgagacatggtgaaaacacgaaggattgtgagtgacgccgggtctggaaaattgtttgacagcgatcgaggcagcctgtccgcgctgaggacgggtcatttttagtccagatttatatacagatacgaaggctgggagtcgcattgcatccttggctcgcctgaccctcgagatccccgtgattaacgacaaaggtaggtcgaggagataagggtccaagtgcaaacccatgtcgcgcatgtttcaaagcaaatccttgccgcccgatttgcgcgcgcgtgcgttcaagcggaacaaggcatccgacccagaggttccgatcgcccattcgggattgcatctgcacgtcgccggacagccacgcatctagcgttgtatttgacactggcattgatcgatacacataaaagttcatgcttttacacaacgctacaacgacagtcatccaccatcaacgcactacttgcttggcgggtacctattttcactcgcggggctagatgtcggaagatacggcaacggtctcggcatcgatgatatcgagttggcgttcctcgatgatctccgcgtctttcgcttttcttcgacaagaggaggggtgtctgtatcgctacgctctgccggatccgtcagctcctcgtctgacccgttgacaagtccttgtcgttcttcccgctcgacgtccgcctcctccttgcggaggtgagggtaatcttttgtgccccgatgcgcaccgccacgcttcatatcgtccgagccggactgcttgccggatttgctcggctgaagtctggcctctgatgaatcagaatgcgtgaagcgatcaagtagattgtggaagctgcctcgactagtgtttggctgagacgcggcttgtggggtagacaaaggcgcatcgaccacatcgtgctcgagcatagggaggttgttcttgttatcgattggagatggagacgtcgtcaagtcgcgcccgtaaggatctcttgtgtcacctagggcttggctgtcaaatggggtcgcatgacgggattctcctggaagttccagaatcggaccgatacttgaccctgagtaacctctattgccatatgcaggcctagcaggactaccatattgccccggagattccccagcatggaggtgcatgtgtgaagtatgcagggcttcgactttgcctttacggtcatattgatggacgacgtcgtgatcatcaaactgtagatgtgttagtgtcatcagcttatgctagcctatattgtgtttccgattgccatctcaccttgagagtcccccttctttgaccatggtcatgcgaagacacccctgatctcagtgatacttgatcgaaggtgtcatccccgctacccattggtcggtcggaaactggatgggcatgtgtcttagtgagccagtcgttattaaaaactcaccagtcactcacgggaatatctcggcacgtcagtcgatacagtctgcgccgcttgccatggcctcgagtaactgttgcttgatgccataggatgcccaggtagcgtacttgcattcgacagtcttcgcgccgatcgggcacgtatgatgctgccgaccgttccgaatccacctcgaagagcgtccattccagctgcaaacaagcctcagtcagtatagtctcacggcgcgctgtttgctcaatctggctcacgctcttctagcgcagtgatgccatttttctctacgtcctctgcttgactcctagatgcagccatgagcatagttgaccgtcgatccaatttttcaaagtttttgggatcaactgcaggacgtcgtcgcgtaaaagtatattgatcagattcgagcgaggtcttcggtcaatgatgtactgctcacctttagacatctggagcaacgtgatgccaaggcatgttactctgtcgcgaaggaaggctatcagcatttcaatcgtacacaggacaggaaaatttactcacagaaatcccatgatcatggtaacaagctgtaccgcgctggtcttcaggcctcgatagaggatctagtattgctgtaggtgagtctctctgccgatatgctagattgctttgacaggatgaagcttacgaaggaggagatcagggtactgaatggtgagatcagcgtggaggccaaatggttcgtcagtgatgttaccgtgcattcgttccgcctgagcatggaacggaacacgatgtgaagcgcaccagcttgtaaacaggacgtagtacgtgggagtgactaaagagccaagcgaatttagtcaccctgattcggtcgattagtacaactcgaacatacccatggacgtgttgaagagctccagcgcctgtggaatcaggttttgtgcatcagcttgcgtgacatagacagactgtcctattcgacaacccaccttgttgagatagttgattctagacatacatagaagttagcagcgcatggtgggtgttgtgttgtcagactcactcgatgagcaacgtaatgactgtgaacacagtgacgacatatagaaaccaatgtttgaactggttgtcgctgaaagcaaaaaagagcgatagttcaatacctaccaccatgactcgatctgagttttcgtggactcaccctcggatactcgtcatgatagctgctccaacgccctgaagcgtactgactagattcgttccgtacaccaggtcagcatatgggtgcgacaaatgttgcggcaatgcgtaccgctcaatcctccgatcagactgcaaatcccgatatacacgaattgattggtcttgccgaatctaggagcgacccagaatgcaaggaaaagagaagcgacgatgcagacaccagctgggtgaattattgggtcagaatgatctcaagacgcgctcgtcgaagtatgagactaaccccaactcaggaaacctgttgttcaaacgaagatgtgagctcctggatgggagagacagcagcttcaccgaatctgcttaccagccgactgtggacaaacatgtgcacacgatcagctacgaatcatcatgacgaccgatgacaaggctacccaccacccaaagcttctggaagacgggaatcgtttcggcgctttgtgtttctggagcgttgagactgggtttattcagcgttgctgggtcagttgaatgctcccgtacccagactcattcaccgctcacgctaagatcgtcgctcccaggatgaccaatgcgcagccaagccatccctaggatttagagaacgccattggaagagttctttgagcagaatgtctgggcacccgaactcacgaaaaaggtgagcgtttcttgcaaaaagaactttgataggatcgcgcagatcacctgcatgtgcaatacgactttcgggtcaggggatccactcggttaacattgcgagctactgcagagacttacgacactgagagctcctaacggcgtaaccaggatagccgccgtgaacgctgatcacccggaacccgaccgttcttgtcagcctttattgtcgggcattcacatcgtcttgtgccttatatagggccatgaagaagactcaccaaaagcggcgaaattgcagacttcaccgaggatcatcatggtcattcccgtccaccagatccagttccgcaaataagcatgaccttctccggccgccccgcccgactttttggtagcctggagcagacctttcttcttgacgacctacaataccacccaagaataatggctcggtcagcgcaaggcaagatgaggcggctgacggacggcaagggggaggactgacgaaagatgctccgataaggagtccagacacgatggctaatgagactccgatgatcttgtacgaggccggagcggggctatgagatcctccagcggaggtggtttgagaggctgaagccgaagccgaggcagtggctgatgtgaggattgtagacatgatgcttgctcgtgcggtcctggtcgtgcgagcggcgtgaggtatttaagagggaagacccgttgtggtcgtctcctttggcccgcaagttgaagggttgaatgtaagcgattggaggaggaatatcaatggatcaaaaggccgctcgtagacgacgttgcacagcgtctgtggtgtagctccgttatctagctcgtccaggtgatccgtaccgggcttgtcaaggcagctataaacaagatctgcccctcgcgtgtagacgctttcgagatccgcttatgtttcttccgattccggaatgggtaaaacgagtgcctcgttccagacgaaaaggatgcaggccttactccgtgtttgttattttcccttgacaggttgatccggttcaaaggaggcccgaggtggaacgagggagacgaatgtcaggaggtatctaaatcggttcgtgtatgattggcgacgatgttccaacgagcttgagaacaactgagtagattctaaccggcttgagccatggaaaaggccgaggaacgttgctgcgtcgaggcggccgggtatcgtctgactatgcaccgcctcgttgatgactgacgggcgaggtgatgttcactccaggtgaccgtttcgagctgcctccgttcgagtgaagtagtatcgtatggtgtgtccgaggtagatctgactatccctctatgtgagctctttccatggctaactgtcggtctcgagtagcaggctatgtcctctcaagatgttactcggaaagtcgaggtcgatcaccctttcttgatctcgaccacgagatagaaccctcggaatcaattcattcgagcgggaggaaatttggttccgagaacgcgtccttacgttttcattgttggttgtggtgatgaaatggtgccgtgatacaggctcactcgctacgtctcatgtcaaacgtctaccagtggccagtagagtcgccgcgacccatcctgaaaaacgtacatacaccgagatcgtcaaggttttactccggcaccggaaaaggtgatggatcggtttcactgtggtagatccgtgcgcattcaacgtcgatgcctggcatcctgattatgacagtgtatctcggaccgctgactttcaaacggtcgaggactgggttttctatcggtcaggacaagttataccacgaccttgcctttcgaaacccttgaatgtcggtgatgcgcggaaaccttcatacgggctgcagatactggatctcaatcggtttgaacgcggacttttcacgtaagagatacatgatcccatcctactttcccgcacggcgagacaaagacgaagacgactacgagctacaaaacaagggcaatgaccgtccgtctgagaaactatgccgaaatctagtagagaaacctcgaaccgtacacgcgcgagattcgttaaagaccgcactactatcgtccgtgcaacgctgcgtgatcctccttccatacgacctctcgtacctagggcaaaagccggatcagaccctggcctgcagggtctcctgacgacgcctcaacctgtccttgctctgttgcaacaacatcctctggacttgttccacctggacgaccttgacttctgggtgaggtcgaggttgagggacatccggagcgggaacgataggagtagagggctcttcgatgtcgacctcgctttcctctgggttgaaaccggtaggcctgcccacccagtccatgctgaagccccaccgaccgccctcgatggccctcttggccaaggcggggtgtaaaggcaagacttctccccggactttcaatccctcggtgctcctccccgaagagagaccgtgcaacccctcgaccccgagatcgacgtgcacgtgaagatcgtgctcggatgctgaggaaggtgcgtaatcgtactcgtgagagtatcgtccgctgagtccgctgacgaggtcggggatcatgacgctgaccactccgagcgaggctaggaagagtgcgaggaagcaggccaggaggttgagcttggtccggttcgagttcgggttcgaagaggtcgagttcgagctgaagctccagctcgacataggatgcgaggtgcttgtcccttgagagaacccggcaagtccagtgccaaaggcggaagtcgagctgaccccgtcttcccgcctagacctcaatcccaccctctccatctccaaccctccacccatgccttgcaattcgaggtcctccaaatccaagtccatctcggactcgcctttatggtcaacatcctgatacccaaagaacttttgggtagacgacgaccccattcccgcgcaagacgaccgacgagtaggctcgataccgctcgaagcgttgtcgtagttcaacacccgcgcgcagcgttgaggcagtcccgaagagcccgtcgccgtcgatgaggaggtcgacgtcgaagtagaagtggaggatccgatggacgtcgtagtcgaagcttggccgaaccgaggggtaggtggcaagtgcggagtagcaggggtgatgatgatgttgatcggttgataggctccttgaacctgatgcgtatctttggcttggtactgagagtgagagttggaagaggtaaagatcgagcgaggaaaggctgacgacgaggaggaagaggtgaagaagggcatggtagtagtgtttatcgttgggtgatgggtttatttgttttgggtgccgatgaggggaagtatggctgtttcgtgattgggcgtaggggcagacttgctggattcacgtttcacggatggtattcctagaccggctagaaaactggatgctcctagtcgaaagatgattggtgtgaattgtcgaagatggtggctgagaacggatcgaggagaaaggactgtcggtacgtcagattgcgatttcgatttcgcgtgtatttgttctcggaatactgaaaagcggatgtcaaccagtgacgtatggtgtgcgagtgcgaactagaagatggacgtcaagccctgtagtacgagatgcgtgatgaggaagcgatatgtggcaggatgtatatgatcggtttgccaaaaggcaaagggtcgatctgttggatctgttgatgatgggcgaaaggttggtcgatgagccgagtatcggccaaaggcacgcgaacgcgacgcgcagccaagaatgaaaaatgatgacgttattttgagtttcacaaagaaggggatggaacgccacttttcggcacggagcctgtgcctcgtatgacaggatttccccctgaattcatcacgtgactctatgccgtgaaagactctcgtcattcggcggtctaatgctcgggtttgaccggccggccggggtggaggtggaggtaagagagacgtcatagcacgttgcccacccccacacttctactctatgaggtgacagatatgccaaggttcactcgctcgatcgctcactcctcacatctcgatcagcagcccagcaatcggtagcttatcgtcgtcgacgttgcaggggattccactctatacatatgcatgccaatcatcaccccgagactaacttgaccaagccattccgtttctcaacacgtcatcatcactccatcaagccgatcctatccttcattccacattgctctacactcgcagggcaatcccgccatgacgaatcaagaggtcaaaaacaaacacctcgacctggatgccgattctgatgggaaagccgaatcaggtcggtcttccccttatatcagggaaaagcaccagaaacagcatcacagccacgaccatgccaatggggatgatgaaggcggtcgagacggcgctccagaagccgacggggatggcgatggacacccggaatccgcctcggcccgtaaacaacgcaataaacacctcggtcgaaagatccaacacggtctccaaaaatcatcatccaggaataccggcctgcccctcgattgttacatcgggttggccttccgggtcttgaagaccaaggaggagatcgagaggtacaagagtcaggtcaggggagcgagcaagagccaggtggatctcgaaaagggagaacagttgttgacctggcaagcggtcgtttcggacggtaagcatcccattggctagccattcactcttatccgaccctctcctccatcattggttactaaaacgatcttcatcgtatcatgtgacgtaactcgttgtggttgtcggagacaggtatcgggacgatcgattcgggcagagacgctacgacacttaaagtcacctctccggaagaagacgagaagcaaggttggaagatggtcaagcatgttgccgagaggatcattaccaccgcgatcgaagtctcggctggaaaatgtaagtgtgcttccggctcataattgagaattggatgtcggtcctgatcgtcaatattgtttctatcacacagcgatgatctttcaagtagtcgccatctctgaacctcttccgcccatcctcgccgaatgtcccatcttcctccctaccttttacgcgcacctctccgccatcccgttcctcatccccagcccgacttacatgttcgagaacctccccgaccctgacccggaatatttcgcttccaacgccgtctcggtcgccttgaagcacttgcacccggccatccactcggcggtcacggtcgggtgtagggaggaagatcgggtcgtacaggtcgatgcgggcgggttgatcaagattgctagtctggaggggtaccagcagtcgacgagtgagaaactatggaagaggtacgtcgcttgtcgcccactcgccgcaatagctcgcgcgagtctctggctcgctccaaacgagctgacatgacgctctgcatcctccctacccgataggttcatggccctcgtcagacatatcaaatcgaacgatatcaaatttgccagagtctcggccacaccccaaggaggcggagtcgcgctcttgcagaacgcgctcgtcagattgtggaaattggtggggctggaggagaatgggatctggttggttcccctgggtcatccgtgagtggttccgccgagaattgccggcaacgagtcgtacgtagctgaccgggtcggaccgtgtatattgggcgggatatagttccgtctttggtgagttgatgccaagaccattcacccaatagtgtctgttgttgatcgcctggttggatcttctcgtcagacatcaccaagaaaaagttccacaatgttttgcaaggtgtcgctgaggaggatgtcaagcttgaggaagaggacgaggagtactttgaggcttggatcaagagtaactatgaaaagttctggaaagacaccggagtaagcccagccacgccataacgatcataatgcccgagccgcattgacagtatctcttctcaggtcttgaccgaccgaatcctcgtggccgacgacccgcaagtggtcccgctcatcccgcgtgtcaaaaaggactttcccgaaaccaagatcatcttccggtctcacattcagatccaatctgacctgacggacgatccctcgaccgaacaggctcacgtctgggattacctgttcgggttcatcaagcatagcgacatgttcctcgcccacccggtcgatttcttcatccccaagaatgtcaaggagactttgcccgtcatgtacatgccgccgagcacggatcccttggacgggttgaacaagccgtttgggaaggagtcaatgcagcagattcaaaaggtctacaacgggttgtcgactcagcagtctggagtcgaaatcgagtgggagcgggggtatttccttcaggtaagcatcgaatcgtcgggagcggcggcgcaggagatgttcctgacgcgcgttgcattcgggcgatgaaatataggtcgctcggttcgaccccagcaaagggttgaatgacctcttggcagggtatcttcaattcaggcaaaaggtcgaagaggcgggcaaagacggcggcgacggcgagctcaaaaaaccgccccaactcatcgtcgtcgggcacggctcgatcgatgatcctgatgggagcaggatttacgaagagcttcatcaggcgagtacggagagcggttgtcccgccgatatcacgatcacttatcagaattgcgttgcagatcgtgaattcggatggctacaagctcgtcaccaaggacgtctcgatcgtccgggcgcccccgtccgacaccttgctcggcgcgctcatgcaaggcgcgacggtggctttgcagctgagcacgcgagagggtttcgaggtcaaggtcagcgaggccgtcttgaaacgggtgcccatcatcgctagtaaagcaggaggtgagccgtcgggttatgtcagggtttcgtacgagtcgaggttcacccggctgcttctgctcgtccccgccaggcatcccgctgcaggtcaaggacggcgtcaacggttggatcgtcgatccctcggcgccagaccaggtcgcacagatcttgttcgaattctacatgggtaaacgtcagctgaaccgccgtcaaggtcgtccggacgaagagttctgcgacgatcgaatgcaccatcatcaatcgtatgacgacgaggatgtggtcaaggaattgcctagggcggacggccaggagaatccggaccacaaggatggggatagtgtaggtgacccaggggtcgttgggtttggagatggagacagcaagatcaaagaaggtaggcggttgaccccgaacgattcggccgacatgtttgtcaagacggtgggcgcgcctttccctagtgagtgccttacaatgctagatttgggatacggaccgcgatcgctgatcccgccgacgacgtctcattactacagaggtcaaaccgactgaggatggacctagtgaagatttctttaccgtgggcaatgcagccaagtggttgttgctcttctcgctcatctcgggcaagtcgatcaagcccgacgctcattcggaagccaacgggggaggtggtgaggcagaggtcgagctgctcaagtcgatgggtctacgtaccgaggactgggagggtgggaaggaggagatgaagaggtggaatggcaaggcggtctggaagatggtcatgggggacgatacggatgagggagaggcgaggatcatctggagggacgagatgcatcagggttaatcgtgagaagcaaacacgcttgaatgtggccggttatagtaaagaatgaagcatctggccgatatgacataataccatcatgatctcttgcttgcatatggccttgccgatgtgtacgaataggacgatcgtcccagagtgagaccgtttcagcatgcggggatacaagctctcctgaaaccagaagttcggacttaagtcgcgcgtgggatatctgaatatcatcaaccgcgcgagatgtcaacaaaaagcgcaaacttgctccatcgcccggtcaagcgggaagcgcgagtcgagtcgctctcgctctcgctaagccgtcgagtggttgtactcagagtctctgctctgaatcgtcttgtcctcccccgcgacgactccccaccacctgtagtcgtggtcgtcgtactcggtcgctacatctatcaattcaaagtcgacatgaacaacatccctacaacatctactcttgttctcgttcaccgacaccacgacacatcaagatggtacgcatagaccctgagactctcatacccatgagaggatcgatccgctaacgctctgcgttatactttcaacaaccaaccaaatccgaaatctacaatcatggtcgctaccttcgctgtcgtctttcgttcgaaatcgtccatcccaatccattccatccgtggtggctggaaacgaaatccttcgtctacgacctcgtcggtacccatgtggtttcctttcgcgatcttgcttgtgtgacactatagggtattgctcgtgattcgcgccacaagcgctcggcatctggtgcccgaagggcccagtacaggaagaagagaaagtttgagttgggtcgtcaacccgccatgaccaagttgggtcccaagaggattcacgaggtccgtgtcaggggaggaaacaccaagcacagggccatgcgattggactctggtaactttgcttggggttccgagcacgtcaccaggaagaccagggtcattgacgtcgtaagtagccgatgcccgcgttgttgtccggtcgctcgagacggcatgctaaaatttattgacgtcttacgataggtctacaactctaccaacaacgagttgctccgaaccaagaccttggttaagggtgccatcatcgagatcgatgctactcccttccgtcagtggtacgaggctcacgtgagtatctaccccgatcgagtctgtttgcttcttgcttcctcccggtctgacctctgtctatgttcatccagtacgccacccccctcggtcgatcgaagaccgccgaggccaccaccggcgagaccgagaccaagcagtccaaccacgtccagcgaatcttgaccgagaggaagaaggacgctgccttggaccccgctttggccaagcagatcaggaccggtaccctttacgcctccatctcttccaggcctggacagagcggaaggtgtgacggatacatcttggagggcaaggagttggacgtgagtaccgggagacgtctgatcgatgcaatggcctgagttattgacgtacctatccttgttcgtaccatgcagttctacttgaagaagctctccctcaagaagaagtaaacgtcttcctgacaccttactgaaccttcttttcgccctcggcctttttggcatatttcaaaatctctgctttatcgcaacatttgtcaggggtcgagctcgtggggaaagaagtgtcgagagaatgtcattttgggatgtatacgatggattctaaaaccggacgagtttttgaacctggccggccgggatgaagcgtctattatctcattgcgttttctggtgttagtcggttctcagtctgcgagcaagttggttggttgtgctgctgagagacaccaccggtaatttctcgagaggctgatcttatcagatctgcccactgccgtacggactgtttccgatgcacctctacatgcaggtctcaagttggggtgtcttcatcggttaatgctaacctgttgttcgattgtgccccctttgcgtctcatccctcccattatccctcccaaaacaccagaagaaagaaagttcataagattatgcaagagaggtagttgggccagagtatacagtagacgagaagcgaccagatcatgaatactgatttcgcaccctgcaagaaggggccgagtcggcaaatagcaagatagtggactatcaagcgatctttcaagccttgtatcattgtagccaatctcggtgatttcgaatgcacaacgtcagcaggaatcacttgacaacagaaagcagcgccacgtcttctccttgtgggtcaaatgcctagatatcagatttggccgcgggcgcattgccttcagcgatgcccaatttttcaaggtcggcagtggcgtggtcagtcaacacaaaggtcatctatgtcattggatggcttcgtaactggtatgaaccattggctcttgatcccctcgaaagctcaccggtgtcgtagtaggctcaatctccgcagtgggactaccgtatcttcctccttgctggttcatttgacgagtacacctccgccgccgtcgaaagtggcacaggcgacgactgctttcagtgacgtttgtggacaacgatccggatccctcgcgagttgctcccatactctgccccggattggcagtttcgacgctggattgtgtcaccatgataaggtcggtgatgtgccttacgtgccatgtctgtgattttctcgttgatgagattctcttcgtcaaccggtcatgcctgggcatcacagcaccgcttgcttcgtcgacatgcagatggacttcacggtgacatccgctgtctaaataagatcggatcggaggagttagtccacccgacagcgacatgtgtcgggttggttttcctgtgactgcacaagcgtgggcgattgtcaacaggctcgagagcctcgaccttggcaatttcggatcctttcctgctaatgctacggaccgagggttgcaaccgctaaatcgttgccaagctgcatcacagtggatgcgacatacgctccagcaactacctgcagcgagagaccccgtgactcaagccacgtcttcgtttcagggctgggcatgattggtgagttgggtttgcagagggggccagtccgataggcagcggtcggtgttccctcctgttcggaacgagtacggcgccaatcggaacgggtggtatcatgagattctgaatcacaatggagttggcaggagctacctggaaggttcatcattgttgccaaacaaacgatctgcttaagacttccaaccctcgcctccccatggaggctggctcaatcgattgtcgagcgtgcggagtgtttttatatacttcggtcttcggcgcactccgtatcaaagatcctttgagcggtcactcaagcaattccttatctacaccttttagtgtcctgttcttgcctctggcggtccgaaatttcgtggcgacatcagcatactcggctccaaccgatcgtcagctccagcagatctgaaacgtcgcctttcaatttatgtatttttaggatttggaagggaatgtttatgcgttttgcaatccgagatcgctggccggttagtcatacctgcccttgctcaagtgaacctctttgtgcgatgtgcatgcatttgtatcgctcggcaaactcttcagcataagcagtgtgcatgtatgataccaatatggctgctagacatttaagcactggtgtacggcaacgagcagcttccacgctggctcatatcgagaccggtcgacctcgcatcgctcccatccccgatcgatcggtactggagatcacgggcaaggacgcccagaaattcttgaaaggtctgactagcagggatgtcgacaagtctccgggctggggatattccggtttcttaacgcctactgtgagtactataacgattgattctatgttgtcaagcgtctgacaacgaccgagacattcagggccgagttctatacgacgcattcatctaccctatatcagcgccagccgacgtcaagcaggcctacctcatcgattacccaaactatatcgcatcagattcgacagaatctgaagtgccacccttgacgaagcatctcaaacgatacgttttgcggtccaagctcaagatccgggatgtaactgaagagtacgatacctggtccgttttgggctcgccatcaagtccaggttggaaccccgagaagtcttggaagttcgggagtggtggggctgcagagattacgtggaacatgcgcggaggagaaggtttggaaaggttagcggcccaggaggggcagataggtagttgggaccttcgaggcgggtggggagagagctcgatgggaaaaaggttcctcgtcaggaagggcgacaagcgtaagcctcgagctgccaaatcctcaatcgctttcttttgtctaagggttgttttcctactctagcttcgccttcaagcgatcatgacgtggcggatgccaatgcctatcttctgagaagaatgctaaacggcgtaccggaaggtcatcacgaaatgatccccggctcgtcacttccattagagagctgtatggacgttatgggaggcggtgagtcggtagctctccgaaacagtatatcgcacggatcgctgacaatgctaacatcgctgggcaatccagtggacttccggaaaggatgttatgtaggacaagaactcactgtccggacgtatcacaccggaaacacaaggaagcgtatcatgcctcttcggtttgaccctccttcgggatctccgtcaggcgcaacgagaaggtggtctgacatcgattccgatcttcagcgaccacaagcgggtgatgctatcacctttgtaccgccagaatcggcggcaagcaagaagcccaaaccgggcgtcaaagtgctgtcggtacatcccgactatgcggtcggactcggtctggttcgcatggagctggttgagcgcgtacatgggttgcccgcgtttggaacgcaaatcgagcgcgatgtgaccgaagagcaagggtcgctggtcgtgggcagtgtcaaactgggcgatgacatttccagcagctggagagttctcgcgggtcgtggtcgcggctggtatagcccggacgaggaattggctcaccagtaaggtggcgtctccatggcgatgtactttcctagaaagactagcatcatgtagattcacgaatcgtcatcgttgttcttccgagtgacacaagagccggtttggaccaattcgagtgctctatatcgacacatctacaagattgacgctatcattacaatgtatacaagatatcaagatcgtaattagtagatacaaacctcccgcctctacgtgtgtttcaaggggatctaggtcatttccgcctttggctccgggttgtcagcctcgtggcgatgccgccgcatctgcttgaaaatctcgttcatcgtattctccgccgccatcatcctgcgcctatcaccgtgccagtatccgctcgtggctcctcccgcgaacgtttgaaagcgcatggtcccctttgtcgtaccgggaggtttcgccttgactttgcccgattgagcaaagtccggcatgacaggaagtggttcgggctgttgggaacctggttttaccgacccggacacgtccaccggctccgtctgtgtctgttgcgaagcgtccggttcttctttaggtagagggactggtttgcttgaccgagcctcttcgacaggagcagcagtcaacaacccgtacattcggttacgagcaatctgtgcgttgtatcttgagtgcatcttgatcgcttggaccagagcatcatgatccaacgctccaggtccttgcggctcctgcccgttggcagccagacgacgagcttctgcatgtctcttccgacccttcttgggtttaaccggagcgctagccaaagccgccgtgctcgtcgaagccaccggagcggtcggtactactgcctcgacatcaattggcggcccttgatcatctgtagcagtctctgtcggtgggacaggtaggacctctcccttctgcaatttgttgaggtcgtcgaagctcatgcttctgcccgtaacgtctcgtttggcttgcaccgagtgttgcttgcagtctagcttccgcaagcaggctgtgttgtccggcttcattaccccacaatgccgatcgggatcgtactctttcttttgcaagccttcagaacccaacgaagtaaggatgaggccatgtgcactgcgcagggtttgcatcggaaaagctcactcttcggttgctggacaacgattttctcctgatcctttgccaacttatcctgctctttcgccattctcctttgctcaaccatcctcttctcgaatgccttcttggtctctagcttgccagtaggcagcatcatgcgctccccattgtcggtcgagccaccaggggtgtactcttcgttgctcgcgacggactcggcaatctcgatcctgggcctcttaggacctttgcgaggtgattcgatcgagggcgaaggtgatactgcagtgactatcagacgagaccgatgagctagaacttgggtttccaccttcgagacactagactcactctcgcttcccgtacgtttcaagcctgccctttgacctcttttgttgccaaacttggcagcatacgccttcttggcttcatcaatccccacacgtacgttaacgcacgattctgaagagatgaagtgctatcagagcagaacagacagcacagacaggaatgtctctcacctgcgtgttcctggacgacggtctccatgacgatccggccgcactgcatacatcgatacaaatccaggccaggctccccattgtccatgcccctcgcatgaaagatgttcatcgtggatgcgggaaacctcttgaccggcgtctctggaaaccttggagtctcaggagctaccgctgatggcgttctcgaagaggcagtaatatgcgtaactgtggacgcagggggagcgacaacggtgtaggtaaacgacgccgaaggtcccgagatgcccggaggcgctggaatcaggcgcaggggcattttgagctgaatagatacatggtagtgtgtttatgtcagtaagatgtggatcgagttctccagcctgttagggatgcaggtactgggtttggacatacagtatagccttctcggcagccgatcgctggttgtccgactgggactcgaaaaccaaaagctctgtttgggctaccagcccgctctttggcttgagagatgcccaaggtgtaccttttggcctaggttgacctctgatccggttgtagggtatatctgtagctcagtaactcgtccgagattgtcaacaggctactacgttgaccctatctggttgagatcgttcgaaccggtcatcggcgacagaaccaattacttgtttccaccttgaacgcgacctaggatcaacgtgatcatccataataatcgcaagacatgggatgttacagcttcattccgttcaatcaatcttgtaatcattgctctatggaattccagaacagctctcatcgctccttcttactctcatccaagctcaaatcatccatctcggtagacgagatgctgtccacggtcgggccaagcgctagtgggctgtcgttcaggcccctagcgggtttgagatcgctcgattgtccggcgatgttggtgctggattgggaattgacaacagtgtttgcgagtgtacgaggacttcgaggaggcgagttgctggtcgagctcggcatagaggccgacgtgtgaggggatgactccatttccctgcgtagcttctcgagctctttctcaaacctggacgaatgaggctatccgttagcggtcggcccccgggaactgtgccacatcagaagtactttctgccaaacacctcgacatagtacgaagctccgttccaagcctatgtttgccagtgatcagacaaagcaaacgaccagtgctgcaacggttcgacttacagaaacgccgaagacaaagatcaaaaagacgatacaagagttgggactcttgatcaagaatgtggcagctggaagcatgaaaaccagggaatagactgcgatcacggccgagctgatcagtacgtaactaatgacagtaagctcgttcaccctcgctcaccaagctgtccagccatgaaagacatctctcggtactttggctgtatgccttgcaaagctttgccgatggggccgtgtttatcgttgagcatgctaagagacgcgcgcgagaatggtcagatttgtcacctgcgcaaggtgagctcgcaagacccactatctgaagctcgtttgacgctggcccgattcgattttttctcgtcgatcgacgatgaccagctttgtgaggaatgtcgatcagcggctataaaaacattccagctaagaaggatcgccctaccttccaatacatcccctgccataggatatctgtgatattgaaggtcattttctagcgttgctctatcgttctactcgaccatcccgcccaacacttacatggcacagcactccacaagatcatctgccaccacgaaaactccttgaccttgagaatcgccgggtagttcacctctcggtcctttgcaaagtgtctggagagagcagaagaatcgtaaaaaaggtgtccatgacggcgaagtcgctttactcactggatgatgataaaagtgagtggcgggtacatgtgaatgaacaagctcgtgacctgggagaacggctctcatcttagcctgacaagtcgatcttcgctcaagccgagctcaccttgtcaagactgtggaagaccaaactgtttctccacgtgatgatggcagacgcaatgggtcctgttgcgactccccactgtcagaataattaatgaaccatctcgctggtgacatgcttaccgagtgtcaaacaccaacacatgacaaagtagtaggcgctactgcggaagaaccagatatagaagaggtccatgatgttgacgaagtaacacaggctacgagagacacgcataggcgcttaagccaagggacatcgagagcggaccatcacagagttactcactctgcgtgaaggaaagagcgaaaacaaatcgtaacgagaggtgcagactttagctattgtccgatattaagcatgttcgtggattgcttaccgaagaggaagtaatggtaagctttcctcttgtaactccagaacctggttgtcagataaaaggtgctttggacggtataagccgtgggaatccattcgggtgcgtatccgcaaaccaagcacgtgaatgtgagggtcattacgccgaataagaaggctatggcatgaacaagattcagtagcagtccgtaagttttgggtaggaagcatactcacatatcttatctcgtgttcggacaatttgagcggattgccattgcttagagagctcgttaactttggtctcgagctgagttccgcgaagtcatgctcgaatcagatcaaacgtaaagtcatgcctcgtaatctcggcgcaccttgagcttgagccgctcgacctccttttctgggtcgatcttgtacttggtccgccgaggctcttcacctcctcgcgagtcgtcatccgggtctatcggggtgcctcgaggggtgcgaagaccacggggaatgagctcggatgcggcttgtttaaggcggtgtgattgagctttaagccttcgttccagtaggtcgagacggctgtctgtgtggtagagagcgggacttgatgtaagtaagaatcactagatctgtactgctctgaaattgtcgaaaacacaccgaagaacgtttcaaatacatctgagagattgatcagacaaggacattagtcatatagctcggatccgcagcgtagggatactcacccaacaaggtcaaagcgccagcccaattgtccttgtcgtctgcttcatatcctcctccgcttcggaacgacatcgagcttgatgtccaggacgagtttgagcgagacagagcgggtcgagcctcgccgtggttcttgatgggctccggcatcatcagtccgtcacttcgagagcttgatcctctgatggtatatcaaggtctaatgatgtacaacgtcagacgacccggtttggcggagagcgcggggagcaggcggggtacaggacaaaactgcaatcaactcgaatccaccttcctttcgctgatcgtgacatcatccttgatggatggtgacgacgatatcatcgctcagaacgcataagatgcacgtgtcgcgtgttatgcgttctattatcgtctggcttatatttgacaacaaggttcgataatcgagaagtcttaccatgaaactagtccaggcgtccaccttgcacgataacattatatgaggttactgggcttttttttttgtgtatacgtctcggatgacctctgatgcgctaccagcttgtttcgttcgaaaatccagcccatgtgatcgtttgcagtaggggccacatcagcctccggatcaccgcggcggcggtcgtctttgcgaccatcgacgagtagtagatgcagagcgagaagaaacgccgtgaacaagcagacctgccccctagccggagcatgcgcgaatgtgacgtttcggtcccggacaatgggcagttcgaaatttccgaaatttcgcttcgattgactgaagacttacctgtgtcatcgtgccccggtattcacgcgtctcatccggagagcttacgcttgggcataggagcaatctaatgctacttcgagatacgtggagcttatttacgctcatcggtgctcaatcaccgtattgggatatcacaaaccgtccgcgttcaatgctgccctacaccagcctcagacatcaatctttttcacatgagaatataggaacctgacgctgggtcatcctaatttggaccatatcgatgcgcgcgacgtaggctgcgttcggaacagtcatgtaggcggtctgatcataccattatgcaggctgagcatgtgtggcttgcactgcagccaggccaaacgggataatgaagcgactccgtctttggctgtttgtcgactgccgcgcatcgccagacctcccgcctgggtgcgcttgcacatactcagcctctccacacagggttacgctcatacgcgtcgtcatgtatttgacagcacatacagcacatgtccacgcagcttcatcgtacacagcagcgtgtgtcggccagagaggtactggtgagtggatcggctgactttcgctttctgcgtgactaagtgtcacacatctctggctagggtcacagctatcacggctccgcgcgttggtaccaggagcgcgaatgggtcgctgcacttcgctcgcgttcaacatgaatggttcggcatggcatcattccggtagtctggacatgctcagtcggcctaaaaacaatctcattcccgttcactccgttgttctcaagctcgggttctaggggtcctgtcgaggctgccatacatccccgccaaggccttgtaaggattgactctaccttggtgttgtcagggtcaacccgaacatgaggccacgcggcgatcgatgcacttttgattcgcgatctcaggaagtcgcctcggactgtccgtacatgtggcgattcctcggtagctcctccggaagctgagtagcaattcatgaatggggccacgaccggccgcacgacggccaaaaacgcccacctgcaatgcgaaggatcgacatgcgatgtggggcaccgtcgtcatcggaagaactctggctgcgtctgccggggggcatctcatttgcacgctccaaatcggttcgctgcgggacagcggcagatgacctgattccgtctcggatgtgtccgctttgcctttgcattaacggcaaattcagcacaacgagcggggaaccgatcatcagctgccctttcccgaagccccacgccccgaaaatacaaagccaaaaaggtcccacgacggctactgagccaggcacgctcagtcggctagacctcggcaggaattggcctcacatcacacgtatagtcgcgcgaggaacgggctgcgcggattcaaacttcggcttgaaaccacatgcatgtccataactttgctcctgtcggccaatcttcggtcacggatgttaggagggtccccgtattcccatttcgggtccaatgctcaggacatcgcatacgagaagcggtcgatcggtctgcttcgaggtcactacgaatatataaggacgggatgaggtccggtgttcatagtttcaacgagctggaatttgtttccgccaccaagcaatacagagtagtctagctcttcatacaactctggcacatcctccaacatggcttcttacgctaccgacgacaaggacaagatctacaccgagcactcggagaacgccatcagcgccgacctagagtaccgcgggcagcagacgggcaacgagaagcatgatgctcaatacctggccgacgcgatggacgctgtgaaggagcagaagcaccaagggttccgagaggcattcgctagttacaagccggcaatgctgtggagcattgtcttctcttccggtaagccgtctaaaacggaccccgcgatcgttctcgctatctgggtacgaacctgaccgtgcttcgcggtttccagccattatcatggagggatacgatacattgcttttgggacaattttatgctcagcctgctttcgctaaggtgagttcgctgtctaggcttgacaccgggtgtgttcgctaaaaccgaatcttgcccccttgcagcgattcggagagctgaaccctgtcaagggaatctacgagattcctaccaagtggcagacctcgttaggtgtctccacgcagatcggaaacatcatcggactccaaatcactggttacgctgccgagaggtttggatacaggatcaccatgctggtcgccctgatctgcctcactggattcctctttattcaattcttcgctgtcaacctcggaatgctattggccggttacctgttgctgggagtgagtctcagtggcgagagtcgaaaccgatccttcattttattgacattcgacgccgcttcatagttcccctgggggtgagccatctaatcccgctcaaggacacgccttgagaacacaactcatcctatttctgtatttgtgttcgcagtaccttccaaactcttaccgtctcttacgccgccgatgtcatgcccgttcgtctgaggcagtacctcactacctacgtcaacttgtgctggtgagtcttcacggaacgcgactcgcgcggtcgtcctcgatccacctgagcacaggcgctaatttgcatcgtgcaccgaccgtactttagggttatcggacagatcatcagttccggtgtcaaccgagctttggtcggcaatgaaaccgagtgggcctacaagatccccttcgccattcaatgggtgtgggttttgcctatcggactcggtatcgcgttcgctcccgagagtccctggtggctcgtcaagaagggaaggttccccgaagccgaaaagtccttgatgcgattgactgcccgtggctctggattcaacgaggacgatgccaagaagcaggtcgccatgatggaccacaccaaccagctcgagatgcaaaccacgtcgggagttcagttctggcactgcttccagggaaccaacttgcgacgaaccgagatcgcctgcgtcgtctggttggttcagcagctctgtggttcgcctttgatgtacgcaatctttcagtcttgaattggctagaggaccaccgctgacgatctgcatcgatctacaggggtaacgccacctacttcttgaagcaagccggtttgagcgagtcgactgcctccaccctcaacttgatcatgttcttcatcggtgctctcggtacaatctcctcttggtggctcatgcagttcgccggacgaaggaccatgtgagtctcttgaggctacccaccacacctcgacgttagctcattcgtattcttgcgcaactttccagctacttgtggggttccgctgcgctcaacgtcctcatgttggtgaccggtgtgttgggaacaatcaagtccagcggagacggcaagaactacgctactggagccatcctcatcctctttaccggtctctacgatctcactgtcggacccgtctgttactcgctcgtcgctgagattggatccacccgtctccgagccaagactgtcatcctcgcccgaaacctttacaacatcggaggtctcgtcatcaacatcgtcaacccttacatgctcaacagtaccgcctggaacttggctgccaagtccggttacgtttggttcggaaccggtatcctcggaacaatctggggtgagtcgacacagcagccgatgaggggtgatcacgagcgcgcgactgaccacggggtttcatcacagtctacttccgtctgcctgagcccgctggcaggacctacggagagctcgacatcttgtttgagcgcaagatccccgcccgtctcttcagcaagaccgaagtcgacgagttcgaggccgccgagcgagatgccgccaacaacgctggtggaggtggtggacccgccatcgcccactaagcgcgacgcaaagctcgacggacgagaattgtcacacaattttgtacccgcccgtcataggaaatggttcgataataggatacttgtacgataatagtctctataggtctggagcaacgcctgtgcgatcgactccctgttgttgcgaagcaatgatgtttagttatatgaatacgaatgtttcaccaaactatcggcggaaaccgcgttatgcgcgtcaactgcagggctcgcagagttcgtctcgatatgataagtcttatcatactactggctagctactggtcgtcatgatcgtttttattcaagcccttgacattgtccactagtatatgactgaccgagcttagattcctagaaagcaacgtacgatgatcagatcgggaatacagactggcggaagcaattcctgacgcggcatcaaatatcgcggaagcaaactgaagaccccggtcaacgcccttctccagctcctgcacacagcaaacaaccataaccaccgttgtctactaactatatacgctctttgggataacagaccagactgcatcgaccaaagacatagcctcgagagccctcggtctgcagtcaaggctagcatcaattacgacctcagaggataggtctgatatacctctttccagccagacgcagatcgtcaggtttgcatcgatcgtataaattcggctgtcattttgtgaacaaacgcgtagtccgtggacaccctgcgtgattcaaccagcctgcaacctatacgcgccgtcgatcctgtcgatccatctcaagaggtcttttacctgcgagtcaacaatgtcagagaatatcgctctcccggaactcaggaggaagacattgtaccgcgatgccgacgatgaagatttctcgattttgccggcgatacctcgcgactctgtgactcgtgcggataacttgaagtccgacgacgtcaaggcgaagtaccagtcggacaagctgccgacgctgtcacggcatagtacgtccgtatccaacaacacgacgagttcagttccaagtagaagatacggatcgagcttgaacgggaacaagcctgataggtcacttcgaagaatccggaaggtcgggtttgtgcttgtcaggcacctcaaattcgtcggaccgggcctggtgagcagcgtagcctactttgacccgtaagccgaatcactgctatatgaagccatcgagatatgcaggaactctgactgaaaagcttacctctcgcttaccctgcatcacagcggaaattggaccgtcgatttgcaagccggatctgactttgggtataagctgctatttgtcatccttcttgctggtcttggagcagcctgtaagtcatcagattgctcaatcgtattatatcatggacacgtctgatacgacatcgggtcacagtgctgcaggttctttccctccgtctagggatcgccacagccaagtcccttcctgcgcagatcagggcgctgtttttgcgtatgcgagatcatcctcgcgtctcgccctacaaatggaggagaaacactgtgatgggagggctatacgtgctctacgctttagcggaattggcaatcatcgctaccgatctggcggaattgctgggcagtgctattgccttaaacctgtaggtctgagcgctacgcacaggcactgcaggcacccacttaaacacgatcgacttgatgtataggatctttccgaaattgcctctttacgccggtggtaagtcttcaatctgcagtgtgcgagtgcaggcagcgaacataggctataacgtcgacgaataccttgatagtcctcttgacggcggtcgatgtcctcgtagtgcttgccttcttccagaggccggagaggggcaggaagggtatgatggcttttgaaatcttgatcgtctgcctcgtgagtgacatgtcgggtgcgaatcaggacgatcggcttacagggcgacgttacaggtcttgtgcgtctttgtctgctttgtcatcctgttgatccagatcaaaccgaaatggggtgatgtattctacggattcgtgccctcgagtgtgagatgcgggcatcggtcgagtgaaacactcttgtctgaccgctgacatctccgcacaaaactttgacagacgatcgttcaatcagacgccttgtacgtggcagtcggcatcataggaggtgagtcccgtgtacaacaatcgacgttacggaccgttgatcctcctatctcaagctactgtcatgccacacggattattcctgggctcacacctcgctaccatcgatcgcttggatactgctcctatacccccttccgatcgaggcgagaacgacggcttgatgaccatgttcaaccgaatccgcgcgaacggcttgccgaagcaaaactggtctggcgtgctacccgccaagtggaggaaaagtaccgagggcgtcaacccgtcggcagagccagaggaggagatcgagccaaccaaggaggagcaggaggccgacgccaaatgggagagcgagagggtacgatacgaggccgaggtcaaggcgttcgaccgggtcaagtatgtcaccgtgtcgatcgcacattcgaccgtgagtcctatacgagattagtttttacagggagacgagctgaaacttggactcgccacctcaggtcgacacaactctttctcttctgggattcgctgttaccatcaacagcgcaatcctcattctcgcttcggctgctttcttctacggtggaaatgaagctgtccgccaagccggctctgatgccgatctatttagtgcccatgacctgatcagtcaacagattagcaaaggtcagttgcggtttcaagctggcatcgtcactgaggcttatcgcgactacgaatcgtatctagcggcggcctttgtatttgcgctcgcgctcctttgcgtacgtcggtgtagttcgatttggctcccaggtacagcggagttgcaagctgatctatagcttgaaacatacagtccggccaaagtgcatccatcaccgcaacactcgccggagtcgtagtcagcgagggtttcatcgaatggaaaactagcgtgagttgataaactctattagagcgacgttacactaacctcccccgcatgttagcctattgttcgacgaatcatcacccgcgcgatttctatcattccaagcgtggtggtggcagttgccgtcggtcgttctggggtgaatcagctgctggttgcttcccaagtctgcctcagtgtggtcctgccgttcgtcgtctttccgctggtctggatatgcgcggacaagaatgtgatgaccgtgcgaaattcgccaacggatgcatcagagaacgcggtcatgccaaacaggagtcgacagctagggctaggcagaaatgaggagatcgaccccgaatcgtccgctcttgcaaccgaagaagcagacagcctaaactctgtttcacctgaagatttcgcagctcatagctcgtcattgggagaggccgatgcggcctcgacaccgacctccacatcgccaaagagcagatcattcacttcacactggacagctacaacgcttggatatgcattgttcgtggtggtcacggtatgtcacaagcgcaatagaatcttcacgtcgaaaggagctgacgttgactgcattccctaaggtcgcaaattgttatgtcttgctcatgcttatgatgggcaagtaggcatgcgaaccggtacgggtggaaccacgattgaagtcgaaatttagttcgtgaaggcaagccccttgggatcattcgctggatcgtgtgcttcgtattgtagcattacactgtatccattaattacagagaacgaatgattagcccttacttgtcatcgaagcgctcgagttcaggtctgcgagtcgcacgtcagcggactttattgcgcaaagacggcgatcgaggccaacttggaaaagtcaatattcacaatcatttatggttggcgtagagggtagcagtgcgttacctggttcaatcgtgtcatcgctcggaggcatcctgcttcacaccgctcgacgcgattcgatagattgcttgaggggtggtatgaggtattaagatcacagatacgatctgaatttgacatttgaagagcatggccaaagcgatcatgaaattgtgtacagccgttacaacgcagagatagtgaatcatgaacaccaaagatagagtttgagggagagaaccgcttatcgtaaatcgccttctgaaacggtgtagcctttcgttggtatggttcgtaaagacgtcgattgtggatcaagctgcgggcctgatactgcgtcgaatgacgtcaagttgggcagaaagatccgcaagtcgcatattgtcctcctgcagtgcttttttagccgggttgcagacgttgaccaggaaggcaaagtctgtggaaaggaaagcgtagcgccaccatatcagcgcgaaagtgtaatatcacatgcgttcgttgggaaacccacctgcttgggcgatcgaagtgagtttcgatcttcttctcttggcaagcttctcttgaaggtcggcgaaaaattccttggaaaccgattccgccctagtaacgatagactcagggacaccggccaaatgagcaacgtctgtaggcggaccagcgataccggtcagcacattccaggctgttcccgatgcgaatgaccgactcacgtgtaccgaaactgctttccgctactccgtcaatcagcttgtacatgggtatcacctcccgcttttcatcgttgacctgtgtagccatatgctgacatctgacgttgggatggggctccggatgcagatacgcctcggtcaacatatggtagtgcgtgctgaagaatccaataggaagcgtgtgtgttgccagttgatggagaatagcctcggccaagctctgaccgtcgaaggttgcggtccctctgccgagttctagtaacaaaagggttacattatcagctaccgaagtcgcaaggtgtacgccaacgcttgctgccgcaccatcaaggattgtcatggcttttggaccagcttccgtcagaattttcttcgcctttggaaggggagccggcacgtcagctcaggtatcagttgctccagccagggtcggccttatctcacctcatccatctcgacggcaaatgtggatcgacccgaaaagatcgcatcataagcgcccatcctggtagcgattcggtcaacaggagaaatactgcgtgtacagacagcaatcagtccaggcccgagacccatgtttggcagagcaacagatgacttacacggctctagcagcaggcacgaaacatcctaattgacagagaatgatgcccatggcagttgatcgcatcaaagtagattttccagcggtatctgttggcaaagatgtcaagaccgatacatacgacttttgacatccgagctcaagcttactgggtcccgttaacagcacctgtcgggcgacgtctcctcctagcttgatgtcgttggcaatgaaatcggtcctcagcgacatgcaagggtgtcgcaggtcctcgaaatcgatgtaagcgctatccgatacaacaatctcgggtcgcactttgggctcgtccatatcggccgacgatttcgcaagcgacaacaagcaatcggtctcggcaaatatgctgcaaagaacagaggtcagcttcttggcgacgagaatgaccgagcgagatcaaaagcatgtaccggacggctttgagccatgtatctctatccttatcgaattccgccattagcgtgccgtagaactctgcaaaggcgatctttcttgtctcccgagcttcctgaacttcccgaataagcggcaatgttttaggtgtaacataacgcgagaaggcctgcatgattcgagccttgagcttgtcggatcgagcagtgtgctattggtcaccatcgagcttaccttggtcccagaagttttggtccaatttgctggggctgaaaacccgctcgcaggcgcttgaatgtggtaaatctcctgcgattgcgaagggaccccctgtcagcttgaacggctatcattgttccgctgaaacgaagcagacccaccttttgaccttgagccgagtgccaataggttaacgacttgcacttggtctgagacttgtaagcctccagggcgtcgtcgagagcctcctcggcggcatcgacagcgtctgcagcttcgtcgcagaccgagctcgcccccttcgacgggatgatggctgcgaatatgtcaatgtcagctgtcactagtcctgcgcgcggatgcgagtaaagggcctcaccgccgtctgtcaacgtgtacatagcttgtagaaccttcatgtactgggcgagatcggggccagatctgatgagctgaccaatgctgctcccctcgaagccttcggccatgtctgctagccgggtgaaaccactcgatatgcgttcaaaagcctccaggactttaagaaaatccgcctgcttgcatcggccagcgtgtattctggatatcaatcgttccagatcgggaacgtttcgtgccatcttgctaaatttctcgctgaattgagggttattcatgagatcctgcaccgcgtccagcctatcaaaaccatgcgcgctgatcagtctcatcgcgctaccatttgctttcccggtattctactcacctcgcattgatggcgtccacttctcgtagcgggaccgtcagccaaaggcgaaacaatctcttgccaaacggggtgatgcatctttgcagcagctgcaagagggtaccctcgtcgccgccttcgttgttgagcaggatctgtcgccggtggcagtggcgtcagtgagacgattgcagaatcgtgccccaagattctgattcacctctagatgactcaaagtctggccgtcaagcaccatgccctctccctttcgaatgggatcgtatatgttgaaactcttttgactgagaaggtcgttggccatgttgagactttgaaggtaaaacatcatcccgcctagggcttcgatggccaattcttgacgttgctccatcatctcgatgatggcagcaggcacttcagtgttctgaccattgctaccgaaaaagtcgttcaacttttcgacagtcgcgtcgtatgagaggaattcggtcgcaggtcgtaacgagacccaggtcgtgttcatgggcagagaattgcgcaagagacgcgacgtcgaggtcgtgagattgccctgcagcggtggtcggtagcgttcgtgaataagaagactcgagatgagcgcaagacggatcgtggagacccactttttcgtgcaacaattccttgatcctcaactgtctcgtcagcgtttccaagcgtgtcgccacattgtcgtcttcccaagaactgagctcgaattgtcccgtcgcagcgtccagcacgcagactccataagtcgctctcgaaccgtcctctgaccgtccctccttgatggccacgcagtgagatgcctcttcttcagtcaagaaagcctcgtctaccaccgtcccgttcgtgagcacgctagcgagctctctcctcacgattccatcccccttggcaggtttgcctgccttggccttgtttcgcatttccattctgcgagagcagggtcgacgcgatcgtcagcctgtttttcgagcttcgctctcctctggacgcgaagagggctcacccgatggccgtctctgcttgctccaccttgccgaccttgtatccggcagccaagaacttggccgcccaccagtcgaaactcgcctcgggcactccaacctgtgcggccgatgaaagccattcgcttagatgacgatgccacgactcgccatatcgagaaagcgcgacttgccatcttcatcttgacccggtccgtgagcttgagatcaaactcggcgtgcccgatctcggcgtcgttttcgtacaattcgtaaaacttgccctgtccactcaaaagtcgatagggtcaatcacagtacggtggcgatggcgagcaagaatcggaggatcattaggcccaagacgcaccttttggaaaaagagcaccgtatcaaagtgattctgcttgatctcccaaaactgcttttcaaacggcgaaaacgtcgaccacgccttgttgggaataaagaccgtcctcggatcatactcgggatcgcccggtcgattcttttccttctgcgagatttcgtcgtctcggtatcagcgtcttgccgtctcgcgacgtctcgctactatgcgccgaaagcagagggatctcgagtcgcaaagctcaaaggactcacatcccgcagatcctttagaaactcgaaacaatcctcctcggccctcttcttctccttggcctccaacctacccctctctgcctgggtcatgaaccctccggaaccggaagccgagacgttcatcccgggtccattggatcgtctcgccgccgagacagacttttcgtcggtcgtgcccaaggggcggatggggggacgggtcggggtcgcctgttgcgtggaagacccagaggggtcgtacgtgtattgcgaagtccgggatgatccagctttggacccagtgacgggtcgtttggatgcggtctttaccgggacgggcgtcttttcaaactcgtccatcgccgccgctagtcaagcacaaaccactcgaggggtcagcacgcccggcgattcgtcccgaacccgactctgaaatacaaggaccgaaacgcagattgctcacccagctcttcatccccgatatcgaacccgtccatcatctcgaaatcgtcctcctcgtccacctcgcccgcatcgaaatcatcatcatcgtcatccccacccctacctctccccttgctcttcttctgcttcttgtttctgttcctattcctgttcctagcggaacccgcggtggacaagtcactatccgatcccgacttggcggtcgaatgcaagggatcagcgtcggacccggactcgtccgtctcggcgtagacgatcttgcgtttcgtcgatcgtctccgggtctacgacgtcgaggtgcaggtccaggttcaggtcggacggatgatgtgatacgaggggagcaccggcgtgaggaggaggagaaggaggtcatcagcatcagcacgagttctgaagaggaacagacgttcgactcaccgaggcggtgatgggcgagtcttctcgctcgttgaccgcagcgggttcgtgatccggactcatatccgcgtctacgtccttgtcgtcctctctcgtagcaggtcgaggcgccgcgggcagatcctcgagttcgctgagcggactggaagactgaactgcgggtcgaagaggcagggtgggctcgataccgggtggagggtcgagaggcggggtctttgctatcggtcctgcgttcgagaacagggtcgagctcggcgcggtaaagacgtcctcgtccaccccggtttccacgtccacgtccacgtccatatccaggtcgatagtagactcttgttcgaccctgatgggcgatcccgacttggcatcgctcttgctcctgatgaacccccccgtgcccttacccttgcccttgttcgtcaaaggagactcttgacctccgacgacgacgacgtccgatttagatccatcccgagagagacttggtcccgctttcaacgtcgagtttgacttcgaagtcgacgtggtcgtactagctgtaggcttcgtcgaggtgttgggcgttttgggcgtcgaacgggcaggaacgctggacccggggctgggtttgctaaagaacccgaggagggttgtctgacggcccgccgaagtgggcgttgatgctggaggcattgtgagaatgtggtactccctgttcaaccttgataaatacgagtggagcacgagtgttttgggaacgggttgatagagatttgatttgatgtggtcaatgatcagagagttgattcgaccatgacctcctgtctcctgcctaccagctgtacctgctagctccctgcatttcacgcgtctttcgcgttcaaacgcgttcaaatgaaatggaaagatcaccaccaggtaaggtaggtaccaaagatacatgttacatttcccgtcgacatccacatcgaccagttgccagttggccagttggccagttgagaggctcgagatgaaaaggtgcaccgacactcagaatgctgagatcgtgcttggctcaaagctcataccaagcgagtgatcgcacaactacttggtacgcgatttgatgatatcgccacctcacgcgtttactagggtgatgatgataacgtcatttgaggagataacgtaaatcacgtgatctccgtccataccgtaatgatggatggatggatggatgataatatgccgtcaccttgattcgatgatgagcggatgggatgttcacggtatggtcaagcgtctattccgttccccgaacatcaaaattccagatcgcccagaccgaccacatcgctagatcttcggacaaccctcacaactttgaacatatagagcatagaacgttgaatcgtatcgtcagggacggacattgcccgcaaacaatcacgcggtgaaaatcaagtcgcccgaccacgcagctagacccggacatagaggaaaaaaaggagtcgacgatcggacgactcgaccctgtcccgctacttgacgtcccgataaccaacgcaacaatatgaccaccaccacgacaagtacgaccagtacgacgggcgaatcgaactcgacgtctactccggtggttcctacccggctgcctaacattcagtacccagccttgttcggggacgcttccatcgtatgtcacccccccggtcgtctcacaaccgagcccacctctttgcaaaaaggttgataacctcatactcgcctcttcacccgtatccgtatccgtattcgtgtccgtccgtgtgtaccgcgtcgggtaggaccatgccgtagcgggattaggagcggggacgatcgccacgctcgtcatgcatcctctggacctcgtcaaggtcaggtttcagttggcgaccacgccgttggcttcggcgtcggcgtcagggtccgggtcaggggtggctgggatagggtcggctgggatggggggtcgggtggggtcgtcggtgtctgcggcttcatcatcaggcgggtcggtgatagcatcagcatcaacatcgacatcgataccctcttccacctccacatcaacgacccctcgccctccccccggagctgtcccacccatccggacgaaaccccgactagggaccgccgtctactcggccttgagggacgcggtcaagcaggacggaccgtcagggctgtatcgcggtttggtccctaacctcgtaggaggggcgagtagctgggggttgtatttcctcttgtgagtcccgagctcgtgcatcctttcccgatcccgaatccgattccgaccacgaggttttacacgggagacttccagggtcgtccggagagagctgatacatcgacgggtggtagttataatatcctcaaaaaacagatgcagggtggggatccaaactacgtgacttccccctcgcagcatctcctcgccgcagcagaagctagtcagtcccccattgcgcgcgaattgtcaaagaggctaccgggataggcatgctgatgatcacgacaccgacgacgacgacgaccccgagcaggcgcgatcacggccatgttgaccaacccgatctgggtcgtcaagaccagggtgtttgctagtagcaaaaattcggaggcgggcagggcttatcgaggactatggcgtaggtctgaacttgatcggtgcccggcgaacgagcaggaaattcagagacgatcaaaaggctgatcacgtcgtatgtcgattcactccaccctgcagacggattacgctcgatttatcggacagaaggtatccgtgggctttatcgaggttccctcttggccctcgtcggcgtgtcgaacgggtcgatacagtttgcgacgtatgaagagatcaagactagacgggcggctgtcaagcggagagccatcgagcgggaaggcagggtctggggtaggggggacgaaaagttggtgagtcgcgaaacgtaccatcggtccaaggtcgagcgcacagccgggggttttcgctgatcctcacggtcggtcgtagtcaaacatggagtacatcttggctagcgggagttcaaaactcgtcgccatcgcattgacctacccgtaccaagttgtacgagcgcgaatacaggcggggagagagggagagatcccgaatctggcgccgcgaaatagcgagagcgcgaggcgcaaacgagccggagcggaggcaagttacgaagctcaccccccttgctattctactgatctgatcgtgatcgataacgaacagcgccaatggcacaaggtgtccgtccagtcccgcagacttcttgagaagaggcttgagatccggactcgcagccttctttgccgttgctgctttgctgaaacaaaatcggccaagatcgaggcgactgatgttgatcgagagatttaattctgtcgaactcaaaagtccgggcagactgggccgcgcgcgcttgtttgatgcgcgggcaacggcgacgacgaaaggaggagatgggaaggttcgagagcgacagcggtttgatctgatgatctggcaccttgtgattatgcctatccgtttgagagagatgccgatggcgacgatagatatttgactaagtccaagttcgggaccgtggccggtagaggtcgaatgtagctgaggctagaccaagtggcagccttgaatgtgaatcccttgttctcactacatacatgagcagcgaatagcagcagatgccttcttataaacatcttagtaaaccgacaaaagaaaaacgatgcccgaagctcatgattcccgtcaccacgttggtgttttcacgcaagcacgcaatggaatctcatgcctaacacatggaaaaacggttagaagccgagaacaacgaggcagatcagtcgccttgtcccctccctctcctcgagtctcgctctgccatctgaaaagagtgaagaggacaaaggaacctgtcattctcccacataacgtggagtttccccggttgatgaagacagactcgcttttctgcgtcatcacggtttcggcgtgaaacgtcacacgacacggggcgagacccgagacgatagctcgaggtttgccatcccttccccgcatacatccatacttctgcatagtgcattcactcatgttgacccttgaggtcgacaaatcgaccatcatgcctttccgaaccacggtggtacaaagatcagatcatccggctgatccttccctcctcacaccgtgtcgcggcgagcggaagcaatcgggaccgggcggcgatcaatcctttcctcgctgccgtaattgtggatattttgatcagaatgagcgagcgagccatgacgaaagatcgggagaggtcgacaaggggccaagggcaaatattcgaggagggtacagtggtaaagtggtcgtcaggattgatctcaacgggactacggcacaaaggctcgacggaaacacttacatagatctactattgaagaaacaacctcggatatcccgcgctcgtctcttgcctcgcgccttgatatacaacctcaatttcgtcaaggcttcctcacagggcagcatcgatctagcgaacaatggcttcagtctctacggccaccgtcgcatccccagacggacctgcaaccgctacatcagcctactcgggtccgaccaacgacggtcgcaaagagcccgctactaaacggaaagtagccggttggaaacactttgtcgcgggagggtgagcgagtcgttagcgatgggttcgagcctccatcaaatatagactcaccaccatgcctctttgatgtcgcctatatagagttggggggatgaccggagctattgtgacttctcctttcgatgtcgtcaaggtgggtcctatccactttacttcgcgtccttgaagcagtacgctgaaacccgtctgcagacccgtcttcaatccgacctcttccgagatcctccttcccggccatcaacatctgctgtaccctcgtcctcctctgtactctcccatgcttcgaaacaagcggaagctctcgcctcatccgccaccgcgaaggctagaatcgcggcggcaagacctgaaggcatcaggggcctggtctaccatttcgttgagacgggtcagatcattcggtgagtagcactcattcgcgctgacatgtggatgtatcgtgttcggataacctgactgacgtctcatcgggtattcgcatgacgtcagggatatttatgtcaacgaaggaccaaaagcgcttttcaaggggctcggaccgacgctggttggcgttgttcccgctcggtaagcttgactcggtcggcgatatgccatgatttggcatggtacacgtgtagctgatgctgagacaccctgcacagtgccatcaacttttccacctatgctcagatgaagaccgtgctcgcatccacctttccctctctttcccctgatcagtctggtttggtaccatcgacgcacaacggtgctaccgcttccgtcggggcggagtcgagccctttcatccatcttggagctgcagcaatagcggggatcgtgacaagcacggctaccaatcctatctggggtgagatcattcatgcgctagctgcaaacgcaaaagcggtcgctaatctgcgttttcgatgcagtcgtcaagacccgtcttcagctcgaagcgagacacagggaaaacaatcaacgagctgccgcttcttcgtcatcttccgcagcgaaagcagccgcatccgcccttaaacccgccattcccgttgcgcccgggaccggtgcggtagcgagcaagctggttcccgcttggcagatgacgaaagatatcctgagcaaagaaggaatcaggggaatgtacaagggaatgagtgccagctatctcggggtgtctgaaggtgtcatccagtgagtcgataatcacactggccttcatcactcgcatcgaggctaacgcattaacctggcgctgcagatgggtgctatacgaggtctgttgctagctgcatgtcaactctggaatgcacaagtactcatcttgtactcacttgcatttcgatagcgattgaaaaaggtctcgacccagacgtaccccgggcaacccacccgctcgaagcttgccgaatgggtgggaatcgtaggatcgagtggaggcgccaagatggtcgcttctctcatcacgtacccccacgaggtcatcaggacccgacttcgacaagcgcccaatccaggagccctgccgaagtatactggactgctgcagactctccgtctggtcattgctgaggaagggtgagtcacttgtccacctgcaatcttcctctcgaggcgatctcatcatacttccttaccttccctcagtgctgcctcgctatatggaggcttatccgcacacttgatgcgagtggttcctaatgctgcttgcatgtttacgatttatgagatcgcgcttcgactatagttccgggaacaggacaatcttttcctccctcatgtctcgctaccatatacctctcttgcgcacacaccaaaagatcacgactctgcttaggaatcgcccagttctccgcgtatcgctcaagtaatacacagttgtagccctacactcctcatcattgcatatgttctgaaatcgatggccaaatccagctgctggacatgaactgttaattcgacttaaatggttgtacaaggtattgctacaagtgatagtggtaagtgaagagatgcgaccatgctcagatgatgtgaacgtgctggaagagcgaaaggcggatcagctcaaagtaagccagcggcaacaccgaatcgtcactcaccaattcgtccaaggtcgtgtacagcagtccctcgtcgatcaacgcctcgatcgcacccctaccggtcagactgtcagtcttcgcaaacgcgcaccaacggctgagtgtgaccgactcacatgatctgttcctgaggttgattcgatcccaatttcttggcgacgaccccgacgtgaacgccatcttctccgacactgttttcctgaatggccttcaagatggctcgatggaaactgggctggttggcccattgatcactgctgtcatcctgcgcattggcacctcccggcaagtagtcggcatgagtatttccagctcgagcaggggcacctactgcagccccgcccgcggactattggggattgcgagccacagcggttagcttttggacctagtcggacttgccagccgtttgaaactcaccttgctcgggttgcgtagggtcaagctgatgtacaaggactccaagaggtggtaatgaacctcgttgaaatcttccacccttcgaatgctttgtgccgagatgtgtctctttccgccgaagctcttcagtactcctagaatcgagacgtaagtatcctgtctgcacggggagagacagccacaatgtcagctcgaccactttccgagctctatcgtatcgactcactcgataccgccggtcttgccattgtcatcatcagccgtatctagccagactcgagcggacatttcgccggtcccatcttcgatcgtgtacgagacgttggtcgccgttctgctgatatttcgaaccactccaacgactcgcacctggacataataggttttagtttcgtacagctacgagaaaagaaagcagaacagagtcgactcacgcttccgacatccactccatcgatctggaaatcggcatcaggatgaggctgatccgcaccgacgatttgcttgatagtgaccggtcgcagagtagattgaccccctttctgttcaggtgagccacagaatcagccatttgactctaaaaggatggacatgccgcttgcctgactttgttggtgctaggagagttctgacttccatacggactaccgttcgctccgcctccgacgaaccccccaccaccaccaccgcctccgccgccgccgttgtaataagggttgctttctgaacgagcgagacgagtgtgtcagagggagtagattgaatatacgaaatcgtttgactcaccgttcatttttgtgtagcttgtgctattctaagtaagtatctgaagccaaggaggtggtgatttcctagcaacttcccaggcattcagatgtcttcatcatccctggttcttgatgcacctggtcatgacattggacgcgatcgaaatgaccaaaacgcgtcggcagcgcgtcaaacacgagagagggcaaggcaaggaaggagatcatgaaaagcgatccgcggatacaacgacgtgcgtacttttactttgatggatgttgtgtcgcacatgatcacgcatcaagcagtcattaatattagtggctatcgatccatcatgagtagagaatatatggtacaggggtgaatatcgttgcggtccttttgaccaagttcgtggcctgaagacgcgggatacgactgaaggaaacaacggtctggcaagaatacagtcagatacgcccaagatcatttctctagaaaggtatccagagatgtctgctgcggatcagtctggcgtatgtttgagtatcagccctcgccatcgttggatggaacacatgacgtacctcaggtttcgctccgttcccgacttttgaagcgctttgggttgtctttcgcttattgaaatccgcctcgtcaagtatctcgatatcatcatcgctctcgctctcgatcttgaccggtttcttgtcctgagtcgcgcttttaagacgcttgctctgccgtactgagtggttagcggctccttcctccttcgcttcctctttgacctcttctgttgccttgcgcttgcccttaacaacggtaggtctcggcacttggggtgcattagaatcatcgcctaatccctcgatccccttgacgttcttaataccagtcttgacaggactatgtactggatcattcaacttggctgacgaagcctcgtgtttcatcttcgcgggcaatttgaacggaccctgacctttctcttcttggcgcttgaaaaagctagcgatcccatcctttcgctctgataccggctctacgtaggttgacgaattggtcccaaccttgccgacttctttcgggacaggatagctgggtagaggcaaaaagtcaggcggatgccttttgttgcatatgctgctcccctcaccattccacagcgccctcgaagggcctcaacaagttggccactttgctggtccacccgtctctgcaatccagccaggccacaagttcgtcctcgccgtctaagatgcaaggcattcggtcgtgcaggaattcgagggatttggagggggtcgttgtgagaatggtaaacgttttgtggggaggttcgtccggtggagaatcgacgtatttgaccgagtcgtatagtccagccagcatcatcagacgaggggttttgctgtccaattgaggtagtttggtgaaatgagggatcttggtcatacctttctatcgccaccataagaaagtgcacgcagtaagaacattggagaaagagagcgcttgagctcgcacaccttttgccattcataataactgttgacaacccagattctgtgagctgcctcagaattcaagaaaggggcgctacatacccttgtaccattagaacgcatcgttttggacctttcagggattgccacatgcctccagcgttatctctgtgatatgttgggcagtctaagtggcatgtttggtcggtgcagactatctgcagtatcgatccctcacatcaagttctccgatcgagcattgatcgtgttcagaggtgcagacggaggatgtttcgaccagtgtggaatcagaccccattgcctaaaagcccaagtattagtaaattgtaaagtatgcatcgcaatctcgatcctgtctcagctcacatagtctcgatgccaagcgcctggtcgcctatgttgattgcgtcttccgcttcttcctcaggccttccttgcgattccacgtcgcttccgcctcctctcattcgagctgccatcgatctcatgacgatgacaggacaattacttctcggtgcgacgttgaaattctctggcctccagcgttcctcgtcatcccaagggatcgactccgcacgctctctccgccttctctcccgctcatgttggctcagaccgtcctcctggtcttggacaaggttgtcggcctcattttcgtggatgtcggcagcatcttccgcatcttccgcatcttggttggcaggaccctgacgtcgacgttctcgcctcaacctatcccgctcgcgtctatctcgacctagttgcgcccgcctctccatctcacgagctcctcctcggccttgctggcgatccaggacacgcgggaacctctctgcagctcctagacgtatgtcctctccctaatgaaggtagcgactatatagtaagcgggatgaaagacatacttgcaaatggatgaagctcaccgaaacccccagggcaaatcgaccgcacatcttgctatgggagatggcgttaggaatccagtcaaagctgattgaggccgccaaagaggcgccggatgataggttgatacaagatcgagaacgctgtagccgttgcagatagacgacatcgagccgacagcagagcaacagtcttggcttcgatgcatcgatatcttgttgtgaaagtccgacatcgacgatgactagagcgaccggtctcgatgagattacgtcattttgcctgggcaatgaccgaagctcgagcgggtctgactgggcaataatgtgtatgtgccaatcgctcatgccttctactttacaactgctcattcgttaattggctacatgatgagatacattctacacaagatctcagaccatgctcgacccttgtcgctggctgcggaacgtggacatgttcgaaaaccgtgaagtcgtggcctgattcgcgctcgaaacgcctgctattgtgttcccattgctgtgtttcttgcccgaaagcatctcctcggccgttacacctggaccccaactatgtttgctttgatttgtgggtgtcatgagacccttccgtacttttcgccggacgatgcgtttggtactgagttgagcagggtttatgggcagacggtcagctaaagttgtaattgcgaccggcgcagagatacttacttccattccacgaaaccatagataaaagcatccaccgcgccctgggcaaagatgaacctgtgatcagacatggttagaaattagcacccaattccacaatcgaaagatacgtcctgcggcacttaccatctagacaccgctcttagagctaccggctcgtcattcgacgcaaaatcgtagatcaatcgcacaagtgagaccgagaacagcaagcaatatctgtggtgagtcaaaaccagacgtgagcgaggggattgccaattttctcgtaagtctagagcgctcacgcaagtggaaagtacagcatcaacatggctgtttttcgattgagatagctcgccgtagattcttgttgcagtatgctatcttcgcttgcatgtctccggtcccggccttgttctccgtactcatcaccttctcgtcgtagaaattgtccaaagtccatctcgcaattatcatcctcctctccttcctcgtcgtcactggaacctcccctcccgctactatctctgactgtctcgctggcggacccatgcctgccttgcgaagattcggggccttccacgttgcccatcccagactctttccgagcgtaggttggcaaaacgaaactgacggggccggaacctcggcgagattctgtttcagatgatgcctgacatgaatctcttctaataccgttctggacgtttggctccccagaacttcttcgcatggccggtattagcacttgcattgatgacgacgtggaaggggtaagagtttcgcttggcggtatcgatggagcgagagacaccctgtattcatcggaagagtctttagggtccacttcatgaagagcgtacggcatcctcaattcgcctgggtgtcgacggggcttgtcaaacacactgctcgaactcagatgttccgaagagaagattgcgctaggcgccgctattggagacggttcgatgacctgggtcatcggggtcgattcctccgggacgacgggtggcagaaatgggggacccggtgatcctcttctaggtacgactgtgccaattgatgattctctggtacgcatcccgttgttggcaacaatctctcggctggtcttttgcggattcattgtaccgtcagtccggttcgaatgcgcgcttgacgtcgcacgcttgcgcccaattttgaagtccccccaaaagccagaggatggcacggagggtgcgggaacgctggagctggagcctccatatctctgaccgtcaacctcgaaaggaggcaattcgagccgttcccatggaggtatctcgccaccgcttctcccagtcggtcccgcttgggtggtctgctccatctgccgcttctctggtgcgaaatctttgccctgcactgccctttcgtctccatggagattgcccattttgatcgcggcaatatcggcgtcctttgcttgcttttcttctttactttgcatgacctttggcttgaaggagaatgaccggaagccttcgcgaatcctctccctcgaactcgctcggctcctcctccggagcctcttcagtctgcctcgagtttgttctgggtccgcttcccttgcgggagcctcgttgttgactccctcgaccacctgcgctgaaccgtaactgtcggtctgccatgtgccgcctccagctgtagatccacctggactcggggagaaggatgcccggattttgtcaggtcgcttgaggaaaacgtatagtctcgcgtagaagaagaagatggcgatgaagacggcagctcttggcacgaactgcatcaaatctccgtacaggcccgagttcgttccgtagtagcagatacctccaactgttgtggacgaagtagaacaaatgagatctgaccgtgatcgacacgttattccaagatcgctgaaacccaccaggccagaacccgtagaggaaataggtgatcaaagacaacgcaaagctaaggacgtagatgacgacgaaaaacatccaccacgacctttcgagatgcctcgttatcgggtgtagaggctattccggtagcagcgggggattagtaaggctatttgggcggtgtgaatatcgcacaaatctcacataaatcaagatcatgtacgtcgcaaaggccaaagcaaaagtccaaaggtgttctgtttaaagagccaattattcttgactgtctattcgtcagaagcgaatacaagccaggcttacctgtccatagaacagctacgagcagtagaccgaaagcatcgcagaaggaagtcccatgggcgtgaacctttcctcgaaggtactcgctgctagtgattgttcctagaatgctgtttcgcaaccgcattagattttgtttcgccgataggatcttggtaagggcattcatcttgttcttttagacgaggcttaccctagtagtagatcgctaaagacaaggccttgaacgagtctcatccgcacggtagaagctcgcttcttaaccaattcccgccagaccatattgcccaagatcgtcccggctccgatcaacgtggtgacctgttcatctctacaatcagccagctggctctagaataacctactggacggtcgacagcgtgtattgcgagaaacttacgagaatgacaatatcaacgataacaatccagtctctcccttcgaccggttttgacgagatcgtctcgcccgcgtcctgcgtctgagctctggccagtggtagaaaggcgaccaggaagagcgctgacaatgacattgagaagccagtccggagatttgtatgtcggtcaagcatagtaacaggataaagacggggttcgtgcaaggtcttgcgaggtcatgaaggggtttgattccgaaagtttagggaacgagaaagtcggatggtatcgctgggttggggggataaaattgaagaccgtttgacaggatggtcaggacctggtttgtgaaaggaaatgtaggcgattataggtgaaatctttcggtttatttgtctgactttcgaggttgaggtgtccttattcagtccggggtgtttttccgggtgtttgaggcaactatgacgcggtcctttcaattccgtctggaattatgattacgaccttttgatgaaacagacgtcgatcttgttcttgttgtcatggccccctggagttgagcggtctgggacaaagagaggccaagggatgaccgaggaggatgatcctcctttgagaccgctgatcgtcgttgcttgcgtcgggagcaaccggaccagatttccgaagcgtcgcgttgggtcagccagcaagaagtgatcttgatgtcgattgcggccaggctaaaaacctatatctatggtctagtagacatttggcccactcaaggtggtagacggagagttcgcacgatgagattatggtccttgtcagaggtgtgtgtgcgtgtgtgtgtgtgtgtgtgtgtgtgtgtgtgtgtgtgtgtgtgtgtgtggtctggccttgaagccgagctcccgaaagtcgcgtacacaaacggtacgcaagcgccgaaaagagagtcaacggcaggaaacagagagggcgacaaagaggggttgaaatgacacaggcaattcgttcgcataattctttcagtctcgcaagaggcaagaagacttggcacaccacctgaccatacgaggtacgtcgacattcatcggttgtcatgatacaaggagtgccccatcccttcactgccgcaacagccgactgtcggcagcgtgctgagtgcaaaaacagctcgatcagtttgtttttacggatgttgccgtgcatcacaaccggccggccgtcgcgataattttgctcgacgacgattccttttgtctctacagacacttccccacaatcgttccgccacgccccgctctagtcaccacgttcgttgccttcgagaccatgtgttcgtatattgatcagccatacagagccattagcgtccatgcctgacgacacggtgctacctggcatggctgtatcgagcgtttatggcactctgtccaattgtgacagatcatgaattgcacgaaacctcaaatttgctatttacgccgcgaagggttcgttggtaaaacttgttatgatttaggtccggcccgggcccggcacagtagtcggcgatcgattttcttacgctcgttgccatatcgagcttaattgccgaactggatgcctgactgtgcagtgccggaatcgtccgaattccttatgcagcgagtccagcgagacctgccctttcgagaacctcgtatagctcgaagagactcgaacgtctgcgcgatcgacctgtttctgccatgcctcggaacactcgcggtcggcaacaccggccacccagcgaggaaaagccactgtttgcagacctcgggcaggcacgctcgcgtgattaccgccttatctgcctcatgccgcaagcatcggtcgcgagcggaaagccattgctgaacgcattgcaaaaaggcaaacggccgctgcgttggtgatccataaaaaacggttagccggcatggactgctgaatgctgattcgacgtctcaaaacccccgttcatccgtatcggatcatcgatggctgtcatgcgaaagagcgcctccgctcggccaagtggcttatcttgctctcggccgtggcaatctcttaccaaggacagaaatgcctgtttcatcaatttgaacttgatccgcgactcgcactacctgtgtttgttctcgtacaagctacacctgaaatgacgaggatcaccagtcccaagaagcttcctcctccctttggtcgcctgtcgaccccgccttcgatataggaaccgacctcgagtctccagaaggttcagttcgatcatcccgctccgtcaagactctgtgcctacgtgtaggtatcggcgcagctcgtctcctctcaccagctgtttgggggcgaggatatctagaactcggcccgccttcatcatcacctgagaatgtaggtgaggtcagagctgccaggttgggggtaggcaaggcttgcgcgagtagattataagtgtcggcgctgaaaaaacggctcagaattcagtatctgcgatgacgatcgagcggaaagcctaccgcacttacatagagctggaaaagaatgcgctggcccgttttgaacccgcttgaactctttggtcgcatgtttgcgtttccagcagtgagatttcatcgtgcttcgtaccgtctgtatacaagcttagactcactgagggttgctcatgacatcgccccatttcttggtccagccgcctgtgtcgaccatgtcctccaaggcttgtccaaaccccaaaccgccgagagattcttcctcgcgaatcgatcgagatgtcgaatccgatctcattgttgatgtcgacgcattagaggaccgccgaccgacggcatccatgctcggccggtcccttatccgtgcttccggttctttgtctgcagaggagacccggtgtacccctgttcccgtgatcaggctgagcgccctagctggtttagcgggtcgtcgaacaggcggctctccctcgacctgatttgaacttgtttctgtttcatccgccgagacgttgagtgtcatggatccgataagttgaccaaggaacttcttgccgccttcgatggctatcgatggattgatcatctcgccaacagacgcgatcgagccagggtattcctgattgtgaccatcgttgtcgaagcggggatgggaaaacgagtgtttggaccccgacgcagaggtggatggtacggtcgtagtggacatcatggccgaacgagacacgatagactgccacctcgccttgaggtcgctgagctctgactgctgtcgagccagttctaggtttgcattgcggccatcttagctatcgaccttgcgatctcagccgatgatcagaattcttaccttgccgagtctcattcacctgggtttccttgttcgcaatggcgcttaataactcggcgtgcctatgtggccgttcgttccataagccctggatgatatgaacagctatgctcgcactcacctctcaaccagtgtcatcggagctgttcgtctaggtcccatccccatcccacgtcccatcaagctccttctcttgtccagttcggatctggcatcgatgctcgacttttcgcgattctcatcaaggtcccgctcgtcctcttcaatgatgcttcgagcagatccgagcgagtctttttcccagctcctacgcctcgaacgtcttacctggggagtccttccccgaggtgcaatgccgtgtagattcggggaagtccggaattgcaagctagcaggtcgaggtcgttgatggcgagctgagtcgaacctctctgatcgcgcagatgtgggcgatccgagggatatccgagggtctatctgagacttggttgagctcgaagagatgggacgtctgggcgttgttggagatgaagctcccgcctgattttgatcgtccactcggggcgaatgaaatcgcatcaatacgggcgagtcctgcatggcatctctcacttcctcctcgacgttctgcccgggtacaatcgtcgtaagctcaattgtatatgattcgctacgtattgacgtacagttgttgtaacactgctggaacctcctccgagactgagtttcttgagcttcagatcaggccgggcaactggtgatgagaaagctatctttgctggagaagccggcggcgtcatcccgggctgcccaaatgggctgatattgtctacaagattcatcgcaaccagccgattgcgatgagccgtgcaatcagaatgagcgtgggtcggcccgaacgagattcgtacgacgttcgaccgagtgattagatgaggtcaagtgagtagccgtgagtagcagcaggcaggcaggtcccgagtgatgtaggtaccctagctcgatcgttccagagggtttgtttacttttttgacgaatcctcggagacatttctccgggaatcgctgcatctctgtgacctagatctgatcctggtcatcaactcatcctctccccgggcaactaggctcggactctgcctctattttagctggctcggtcatattatcgaggcattatcctggcccctgcctgagtctgacatagtccgcgccttgaagagctctgtcggggtgcacggccagagcacacgatggcctttcctcacccattctcggccagctcgaaacctctaccttcggaagactactggaagtcgaccaaccctctcccattcgcagcgactttgaaccaaggtcccctattcaatgatcgagatctgaatggcaagggaaaacgacgagccaagcaggatagcgatgaagagcctttcacagggacgtcttatcttgctcaaggcctcgcgcagctcgaactacagtcgaagccgtctgcaaagagtccgggttcggtaacctcatcgacggctctatccccgacggtgacggacaagtcattacctggagatgaggacgatgctcaagttttagccgagcgaaagatagcagaatgcgtactgctggatcagcctcggctggacttgacggggatgggtttgcaatacctaccggatgacgtcgcgaacctccggtacatcttccacctcgaacggaaagcaccgatatcgagcccatcgataaacagaggagacctttacaagacacctcccggctcaccttccgctcaaggagttcgaggatcgcctggtagtgatttgcgcggcgtgagaccttgggccagatccacgtcattaccagcatccatgatcaccgcgccggtgtccctcggagtcgatggagctcctatttcgccttggaagcaaagcctacggggatcttactcaaaccccttgggactgggtccacctccctccgctcgatcaggcactttcgatgccttcttgcctccaggctcacccgttctggaacgggacgacgaggatgatgccttcgcggtcacctcagccgaaaacgccagacgcacttctagtcgggttccaacgagcccactcaaagggagaggtcaggacagaatgggcaaacgtaattttacagcaccggctagctcgaagctcagggtcaggtttggagcggaactcgattcgcccgataccgatctccgacccaccagggatacttcttcgagctcatcagcgtcgtcatcttccagctcgtctcccgagaacgagccgacgagccttccctggggagatcgcaaaatgccctccacgccgactcgctctccggctcgtgcagtcgtcgatgaacctgtgcttgagagtcactctcgcaccaaggatactccgaggacgtttgaaacggccaagtcgttatcggccgtaaattttggtcattcgcctgtgagtcggaccagacggacgatgcagcggaccgcttcgggattctacgagcagtccggggagacatcttggaatggagaaggcggttccgatctggcgttatatctaggccacaatgcgatcagacggtgaggtcgagaattgaggtggcccaacatacccttgcttacgttcgttcatgcctaatagcctgcctagttctctctttctggtgaccaacatgactgtgttatcgttacgtaagtcggccagtcgattttctctcagccgatactcaccttgtgcgaacgggaacttaggagccaatggactcgaaagattgccggccggagtagggcagttgaaacgattgaaagaactgaatgtcagcaataacttgatcgtacgttgagggagccacacctagtgccagccggaatactcatccatatagctcatccaacgggttgacagaaatctttcccaccgtctctcctggacctcaaagagctgacactcttcaattgcatcaacaatccattaatccggacaccaagccaattcgagctttcggggcgcaacttgggtccccttgtcacaatggtcaaccaggaaaacaccgctttagcccaagtaccgtctctccattccttatgccttgcaaagttgctctcgaccagtgaaaccagtcatataccccctctcttatcgcgctttgactggaatccagaaggaggcgagaatcatgctctacagagcccagacaacttgcgcagacacctcaaacacttgacgcttgccgactgcgccagagtcatacaagcgctgcgttcggcatccgatgccaagcaagaccgagtatatgagcatagtcttccagaaaacgtcgcttctccggcaaggaggcgcatgcagaagaatcgaaggcagcgcgaaacatcgctgacggaggacgcggcgacaaatcccttcttcgcgccatgcccgaacccacgacattattatcgtcgaggtgaaggtaccgataagatatcgcggatgaccaaatggatctatcttcaatcgcccgtagaggaacgaatagagtatgttgaaattgcaggagagaagagcatcccaatcaaatgggagggatgctgtagaggctgtctcgacttcctcatcgagccagtcctcgatgacgatcaggatgccgatgggttcgatgctgccgttctggaggatgacgacgttacaccctgggcgacacaaacatgaatacaaggtgtagcatgtacaatcaggtattatactgttcaactacagctgggtctcctggttaggagcctccattccgagaagcacatagacctcttctggcgtcctgttcatcagcgttgaggggaactcgtacttgttgttcttgtccatgatggcattgtgtagccgttcgtagtcgcgagcgagcttttctagtgctccccggtgtatctctgtcgcgattcgtggtgaagtaagaagcgcaagccgagcagacgtcagaacgtcgaccgatgttaggaagccttccaagcccttcacagcgacggtaatggtgcgcgagtctgccgcgggtgatcgggagaggggaacagcctgaaatttttgtcgcacagttcagcatcctgtattgtcagaaattgatggcacttctgctcacatcgccatcggcccctttttgtgcattcagggcctcgataacaccagtcagaccactttgtttgagcaaattgcggtagtgttgctcgagcaagctcgcttcccatttctcaatttgctgttggagcccctgttgccgcgcagaagtgaagctatatgcttcaaggacgtgctgagtcgaacgcgtgctcggtcagtttgcttcaggatggggggcaacagtctcctccgactgcaatctcatcggatcgaacgagatggcttacctgcaaatagagcgaacaattgatcaagaaaatgtccttctcccactccccactcccccgcttcatctcgatcatttgccgacacatggccataagaggatccgctgcggcctgtaagatcttggcgaagtccgcttcacgttctacatcgtccacgagagaggtgtcatacacagacatgatctcgtggaggacgtgcgaagattctcgcagcgcagtagggggcgccagattatcttccggagcctacggattctgtcgagtgaacatggtttcgaatggtcacgcaatttccctactcacatggaggaatcgcaaaagacttcgaccttgagcttctaatttactcaagaatgccttgtgcgcaatgccatatatgctttttgtgagaaggcatccggtcagctaggtcgttgcgcgggcgaaggtggcgatcgtcgcgtactcagcaagcgccacagtgagagtcgctccctccccaatcgtcctctgcatcgtcacgaggtagaattgtaccaggttggctattttgtaggccatgatgacgccctcttgcgattcgacggtgtcgcgtatccggatctacacatgattacgagcgttagagcattgatctggaagcggatcagctatggtaacgttgcaaaccgattcacctttagcggcctgcaaagtccttcgagatttttgtccagacagcttcttgacaaatccccgcggatttgctgttccatttccttcgcatcaccgacatcctctcccaagggtttggaggtgccgaattcacgcgtttgcccaaccatgcgtcttttccccttgtcgacgtcaaagaggctctctaagaattcgttctcccccgctgtcgcctgatgtacccaagccagcatgtctccgatataccgtgttggatcgtgagcatacagctcgataggcctggggaacccgtcggggcctcctctcgtcaaggcgtcgaggaaggattgcagaatcgacgcctgacgtatcgccgtgagaacgttcatagcgtcgctttaatcataaccaagcagaatcggttggcgtctcgatttgatggcatcacattcttgttctcttcgtacttactcgaacaagctatcctgtgttcgaagtcgccgcacggcttcccgtaagacctgcgatacctcgagctgcgtatctcttgtaaactttctgaattcgaaacagcaatatcggtggatccggtcaaatgccagatcccgttgcgaggacgccatcgacatgatctccttgctaccatccgcgtcgatgcgaagatattcagcgtcagctcattgcgatctgccgaggatggatactgcaagcttacgcagcaagtgctggatcccgcccttcgacgccatctccctcttgatctcgctcagttccattgtctgccccgagtccgtcattgctgcctactccagccaccaagaacaatcccgcgcagtcttcgcggatcttgttgacgcggtccatggcttggaatagccgttcgttgatggtcacgtccttcgagttgagtacctcggattcttcggaagtcaaggtgaagtgtttcaaaaagagactagacagctcggaacgcatcctcgtagaggccctgctcacagagatctggatcagcattctgttggtgacacggcgaggagcacgagccccggacttactgttgatcctggagcccttttgctctctccaataaggtctgagtgcccttgttcgcgctgtctagctccgcctgtatagagctgcatcggttctgcatctcgtctaggtaccctcggagcgcttgcaatttctgtcgtgaaggattagatggatcatgagacacctaaggggatattcagctcgactggaaaggctcatggacttacctcgtcgaccttcccaaacgctttcaaaaatttcatgctactcttcgctaattccccttcaacatccttcttgaaattctttctagccctggcagcggcgtctgggtctgcatccctcaacaaggaccgcattgcccttttggcccgcctcttccttgcgtcgtcattaggtctcgcgttctcgtcgtcttcggaggaatcggaagtctcgtcccactccgcatccttgtcgttggacagccagtatccattcgttcggctgggacctgcttcggcaccatctaggggggtagtaagtcggcagtatttctctgatatgatctgtagtgcttcctgtgttggctggtcgagcgtcgttcgtgaggtgatcttgtaaagccggagtgcgatcggattgttgcgggttgtctgggcgttgccgtttggtagaggcagcgaatcgctcggcgccgaaggcggactctgtaacgacatattcagcgccgctactaggtctgctatctactgaaatgtttctcctcaaggaagacgactgaaggcttcagcgatcagtattgacgatgtttataggtataccccttactctgatatggttgttcggtagcttccacgcgcgctgccgttgctgttccttccgagttgaccgcggctcatgtagattccaccaaatcaatcgtcatgtcatccaacacaggtgtatcctttcgttctgatattaagcgaccacgcaaggaaggatgacccagctacatagcacagagtatcatccatagcagaagtcaaccgtacttgtggcgaccatcgatcaactgttaaatcgctagaggaatcatcaggatagcaacgccgcgatatcgaccaaacgagctggtcggagctgttcgcctctcttgcctccctcactcactgcccaactttgatcatcaattgagggccgactggacgtagcgtcaacaaaaattggggctccagtcatgttctcatggatgagcaagatgataggactcaacgggtaaatgctccatctcgaaacgctacctagagtcacagaactgaccgtgacgtcacggcttcgtttatcgtagcgatgccaactcttacttcccgaccgctcctgagggagacttcgtgcccaggcccgatcaggtgctcgagatccaacggattctttcacaggttctccctccggagttatcatatcctatcctcgaacacgcaggatatcctccgccggtcgtagtagagaggaccgagacgaaagtctatactgctcgaattgggaacgatatttggcagctgtggggtagggaggagaccaggaaacaattcgaagactactggcattatctagagacagatgagatctggggtagtgcccctgaggccactgtcctcccagcagaggcagacgagcagagcagcaatggagatgtccgaaccgatgatggggattccgacagcgacatgctcgattttgtagcggacgaagctcctcggggcgattctatgtggtggttgaaagaggtgatcgtgactatgacctctcgcgatcaaggttggtcagaaactcccgaacatcgcgggacttacaaccagtcctacacctggttcgacattgccatcaaacggccaatcaccccgggaggaccgctcgaataccttcctggagatttcgagctacaaaggaacaaacacgcacatccgctttgggagacccatacggtgcctctaccgctggatgatccgtttttccagcggcttcgggcaggtgacgttctcgtgctgctagccaaagccaagtaccccgtgagtatccctaattagtcaaggaactatcatgctgacatactatatcgccgcgatagggctgggcgaaccacatcaagtaagtcttctcccactcctattcgactctaaatcccggacacgacactgattgttcttcctctaggcatgcaaagatcgagatgaagtattcgttgtaatcgccatgaggcttgtctcggcaccgtgaacatcaacaatgtaacgataattgtatgaattctaccggcatcataccacctcgcgaataggtcaaagctgcgctttgacaatacgttagttccttagagcaggaccagatcggcagatctcaacacactcaagcgccgtaacgtagagccattctatcgctacgtttgtcagcccaacgattctaatccgctcatgcccggaaatccacttaccttgcagtcgattctctagctgatctgctttcgaccggtcgttcctcgtcggaatgattctcgtgtttgacccgatcgagtgaaggctcgggcgatcgccgaacctgcgtcatccagccctcgatccttcgattctttacctcccttgccacgggtttttctcgcagccttgacgcgtcgttctcgcgagagtccgttcgacgtcgctttcgtttcagcctgccttccgtcatcgctgcttctctcgagcgctccttctcaacttccgtgtcttcatcactcgcgccatattgcaagtctgggccccgttgaacgtatcctggtgccctggaaggtccagcccgggcttgatcgtacgtttccacccttgacctatatgaagccacttgctgggccctgatggctgcccgatggcgtgcattgggacaaggttggtgcacgcgtctttccgtcgcgggtacgtccgattgatcctcagtcttgacccgtgaggagggattcctcccctcgtccaatctctcatcttcttccggtccactatctgggtcatccacggaaaagattgtgaagatagtgtcgagtaatcgctcgacatccgcttccgaattcaagtggcgttcccgtgcaaaccattcgagacattcccgcttgatattcgccccgccatcggccaccgtattcttgaacacgtgttccatcatataataatcacatccttgcagttgcggtatcagggtatttggcgagagggaccgaggcttgaacagactggtcaagacctcgagctcgggtagcgtgacgtgccgcgccaggggacagtactgtttccgaatgtaacacgattctgagtatgaacgaaggcgagctgtcaatcacacatcgacttacgatcttgctcggccattcagcctcgccagcttgcgccgagaccatttgagccgcaacgtgcttcatcttgatggcatgttcgacaacgtgctcttccacaaattccaccctgactactcggttccgagaggtcttgatggtttcacaccctccaccggatctttcacaagcgtggaacaaggaagatggatcggaggttcctagctgttgcaacagagggtcgccttgcagaagcaagtgattttgcaactgccaccgatccaagtgtatcttggtatcatacgtccttgccagcgctttgaggacctcttcgtaaccgaacgtccaacaatgtagatgaaatgtggtatctgccggaaatccattgatcaagtggataaggttgcctatcgcttcttctcgcgatggcatgtcgcacgagcccacaagcaaactggtgtcgaggtagatgcgatccagttggcgtcgcaaaccagcaccacctcctccgcgcaacgattggatatcgccagtattcctgtagacatctccttcaaagaatcgttgtgaggatccggataccggaatgcgcttatccttcatgatcctgccactaccagtcttggccttcacaggatatccttgaaagaagggttgaactaatggttttctgatgagatcttggataaatccatcatccgctcgcatatctccggtgtgcaggaccgaagtgaatggcgggaaaggcgaccagagtaggaacatggaagatcccgggcaatgatttgcgtcaagcattaccagattcacgatggttgacccagacgaggacgacaatgtaagaggtattaccgtgttgtagggtattgttttctgtagatcatatatgcagcttcgctggtgagatgtcttgatttgcggaaggcatgtcggacgaacatacgatgcaatcgacaggcattgagtttccatcaacctcgaccatcttcgcctttagtccttcatagacttttctttgctcaatcccgttctccctgatcttgcaataaatccaagcgtcgtccaggttgttacgttcagcttccgccacgatcggattgaccgccgtgtcgaacgctacacggtctttacgccgttcataattgagtaaaagagtcttggtattttcggagcatagaatggtacagttgttgtgcaagttggtcaagccactgagatgatcggtatgtgcgtgagtgaggaggtagtactgggcttgcggagctcgatagacgccggacctctcaggccctttctgcttggacggtccagcctgtagtgggtgactcgactcgtcgtcgggcagggtcagaggatagggtatatattgtgggcgattttccgttggctgagtgaagcagtcgatgcggatctgagggaactcgagaacatgcccatctaccaataccaacatggcttttagctaagatctcgcgaagcaaacgcaatatacgcacggtatagcccagccatgacggcaacgcccgaactagcgttcgacagaggtagaagtcgtatcaaacggtcctgactcgtcgatcatgtcaaccggcgaggagttgcatcatcgtcattgattgtgagagcgtttgtatttgaagccgacgaggtagtatgaagcatgtgaagaggttcctccgaaggcagtgaccggctgatcatgcttgattgaggtctgaggtcgatgggccgagggaggccacgggcgacgcgcatatcagcaatcgccgagtcgcgacgataatatgatggcgcatatttcggtcctggtaacaagaccgtcgatcatgtcgatatgatcaaattccatcatgagcggagctcagtgaaatacaaagaatcaagacaactgtaccccaagactatcaacgcatctgaaaattagtcaacatgtgcatgctggtgactatgttgcgctcgtcatgaacccggcatctcctgcgccgcccgcacttgtacattcggggtacttgtctcgagctcccccaccctcgatggtgtgccccttgaaccaaagcattctttggcaaaagctcccatagcgttatatcttgcttgtcttacattctccattcataaccctcagaagatcctcacagtgagccgagccgggcagtccatcttgctgatcggcaatctgtgatgaatgtttcaatgttgcttgggctgaatgcagtcagtagtctcactttctctcgcctggctcaagattccctatctttgctcgcttgatcgtccttcggtctccccggctcggcggccagtgtcgattgcgattatcgctcagacacgttcccggaaatctcgagtctagagtacgaagctactttcactcgcgcaaagatccttacggctcgacctacaagtaatacagggtaattctatgtttttggcttgtcaaagagaccagatccgatcttactatgtccagagggcgttcgagtcattaccagtcatctggggtgcatgtatatccataaaatacgggacgtcaattaataaggcgagcagtgcgccggcttgccaaaagaagactgttattttcgtattatcgtaatcccgatcggctgctgtatcgcttcaatctgcaacttcaagaatcatcgctttcgtgccaccgagcgtgagcctccctggaaaaattatatacagtagttccgcattttttgcagatggtttgcgaagagacggccatttcttcttctacgatggatggctctgtatcgaaatcacatgtcgtgtcagccccgtcgggggattctttgtcgttatcgtcatggagagattcagtaggcgattgagcctgagcgttgttctcagccgtggataggatcgtggttcgtaattgcttgcttggcttcgtttcgggactggagtcgatctcgattatctcgaattcgtcgtcaatgtctatcgcctgagtcgccgagaaacccggccccatgctcttctgtcgcttgtcgctagaaggcctcgcgatgaggggcgccttccgcttgaccgagtcacccggcttcgcgtagcgagccaggacttctcgcttgatatcggaagggagagagtcgagaaagtcttgatcgggtgcggctggaccagacgaccaaccgtgtacgagggatggcggtggtctctcgcttgaaagattaacagcggctacgttgatactgcaacatgttcacagctcagtttcgatgtcgacacacaacacgcgatgctaggcgactcacacataaacagcgaactcgtccgtatcctcgctcttgtcgccctttttaagtccgagaagttctttcaaaaggcccgacccgatcttgctcatcaaagcctcggctctatcggcgaccgtccgctgggtatcgaaaacaaaggccggcatcacgatgctcttcaaatccctcccgccaggatgatcccaatcgagtctaagcgcgagccggaattgccgtggatatcgcttccaagtacgcctcgaagttgcttcaactttggctctagacccattttcgaggggccgccagattccttccactgtggcgtcatccatcaactcatcctccaaccgatccagaaggtcctcgacaagagcctgcatctgccctcgaattttaccgagtgaccgtttcatagtcctggcatagctatcttcgacgctgatctgtttaggatactctggatttggtctgaccatttcttcgtcaatcccgtgcaggagaccccatagacgaggtcccagttttggttgatccttgaacagcctgataaagtctgatcggacgaacaaggacctcacccgatggacggtcagcggtgcttcgaacacgatcgatcgagcaccgagatcgtcaatcaagctcgctaccgtcttgcttccgaatccattgagcttccggacctccatcgagtcgaggaatttctgcaccatgtcgccttccgcctctccatcggcctcgtgtccgtgccataccggttcagcgaggaacgttgtctgagcatcaggctttttcacgcccgcgacgagtttagccaataacttgttcctcgcgatccctgcggatgaagtgagacccatgatttccttgatctttttccttataaaggcggcgaggtgaccgccgatgatcagtgcttgtgcatcgacatcgggagagctgggacccggtgcgatagcacgagaggccggagcgaggacatgtccgggcaaggacgaaggattgtaggcgaaacccggaggtgatctctctggcgtcagttcttgggcggtggaaggcaaggggaagaagatcgacgtcgaggattgccaagaggtcgatatctgctccaggtgatcgtacacgaggttggtagcatcgataaagacctgtagaagggcgtcacgtaagaggatcagctctcaaacgttaacggcgtgatcacaacactggggcatacctcgtcgagacccagcttttccactgctcgatctcccccttctttgacgccgactacggctcctacgagtctgacaactcccctcgaaaacctccgataattggtcaaatcctctccatccaccaagatcatctcgggaaccaattccttggcctttttaatgctcatgagcttggtcacccctcgagctcgagcttcataagaggtcgtggcgagcaacgacttctgggtgatcccgacgggcttcccccggagggaagggtccaacacgcgttcaacacctgcgaaggggtattgttcagatgtcgaactctagcgagtaggtcaatgaacttgaacttgccgcaataaaagttgtcctggtcgagtgcgatgatgatcggctttcgatcgagtcggcgacgaggagcagcgaacatggtcgatgccttaatctaggtcgtaggcatgtctatccgaaggttcagagtttggtcatctgctccgtgagttctcattgcatactatctcagcatgaatttttggctagatgcacaagatgttacgtatcgtcaatcgcatgctgtatagtagtcgggggtggtcgttgatcgatccattggtccttcgagtcccttgttcctttggttgaaccactttccagctttacgtcgaaaagtggaggccaggctaagtggtccaagctttcgtgttcaactcacgagcagaaacacatgcagcgagcatcggctgtgcttcgtctttcaccagcttggtctttctcctccagtaggatcaagtagcaccctgcgacataatagtttctgttcaccagcgaggcatatgtcttttccatatcgaaccttactatccagctaccaatcctccgctgttcgcgactgcctagctgagcaaaactttccaaaaggtaccccttgtaggaaaactcaatgcgcgaccaagtggttacgaagcgaatcctctgacacgatgatgacctgatgaacgatgctaatacgatgatgatacacccggccccccctcgaaacttccataaccggcacggaccaagcccgtcccttcctctttgcattcgcagtgcgccccgcttccctcccgaccgagtccagtgctccaagttgaccgaacgtcaccccatcctctacagatccttcttggcctggacatccccaacgacgactccctcggcggtagctcccgcccgggcggtcctcacgtcgagtttccgcatctcagcttcctcttgacgtttagcgtattcctgaccggcttgcatgaggataattccgagcaggcactacgaggagtatgaaaaagatttgaagggcggggtatgagcgtggtggtctcgtggtagagaagagggccgggatgaggaatgacttacgaatccgaccagggcgttaccggcgctgaggactcgaacggcttcttgcttctcctcttcgttccacacccgagcgttggcatcgtagggaacattggccgatttgactgtgttttcacagcggatcacaatgtggataggtaacaagcaaagagttgagctcgacggccgggtcgacgggtctcgtagggagtactcaccaaagacaggcaagttgggcacgtggatcgtcaggtagatgatgatcgaagccatgtggagcaccaaacagctcccatcaaagaagacggcgctctcgctccacatgtgcagcttgcaaacgatagcgaacaagggaatccctagagccgtatgcaagagcgccttgacggccttgggcgcgtcgtaccacatcgtgtagaatgcatacgcggattcgagcgaggattcggtgaggtgagtgtggtagaggagaggaatgtcgatgatctggcagacaaagactagtccgaggaggaacgaggtcgaccccaggatgatggattggagaaaggccatggtcgcaagcagcacgtttgaagacgggatctactgaacgtgcaggtagtgtccgattcgacgttctcaagagagggccaactatgtaacgctggaaggtgaagcggggtcgggtcgaatcagctgtccgagacgaagttgatctggttcaagtgtagatatttgtcaagcaatcaagcctcgagtcgcgatgtgggcggctcgcgagaaccgaaacgggtgattccgcggttgagcatgccggcatcgtctgccacgagaagtccgtttgttctcggagccggcgcttcatcgcaagcgatcgaagaggccgcagagggttcatggacaacttgaagcgcgcatttccaaagtacttccggtcaaagtcgttgttgttcccgtgatgacgatggcaagatcgtctggctccaggtggatcgattggaacgccgttgtaccggtcgggtcggtcgttcgaccagcgaccagcggcccaggcgagaagccacggaactcgcgccattctcggctaataaaattcactcgacgcggcgacgaccgacgacagagggaaatcacgctagggggtcaagcgagagaactcacagaaagggcagagagagagaggaaagcggccacgcgctgccgccgcatccgccaacctttggccgatcgtttagcatccgccacccttcctctctccctttcccccctccccgtagccctctttcaaatctggcgccgcgccctttcctgcccgcgtcgaccatatcgactctgaacccctgatccgacatgatctgatctgatgtggtttggtcttcaatcgtcaccgtcaccctttcgaccactctgccaacctcaacgccgatatcctgaccgatcgatcacttgaatcagctcacatattcctctcctccacgggtcttacctgttcctggggtacatacgacatcactgcatacaagaggaaatcaacgaagcggtgtctgtctggcaataacaggtacattcaagttcacttcgaccaacaggccgctggtgccgagactcgctgacgactcatacttgatgcaggcacatccggaataaccacgaagaatcggactgccgtgatgcaacgtgacacgcaagcatacaagcgggcttcctcgcctaagaggaccagttctgttgcgcctgtgtcgtcgaaaccacaggcgtcttcatcgtcgaatggatcagcacccaccgcggcgggtcccacctcaggtccagcgaacgactcctcaacctcaacgacgggcaggcagtcatcgacgaacccgtacacgaggccggaagatcctgtccgacctcgctatccctacggtatcccccaggcttctccttggggaagttctggcagtagcaatcgtccgtatcaacccttgtccgcccccacaggtcacaatactgcctcgggccaaccgttatccggtccctcttcgtcggcatcgtcgtccgtcgccacgggcaccgggtcgcgcaactcgtccgtcttcccccgggtcccgccttccatggaactctcgctcgctgaaaaggagagagaaagaagtcggcttcgagggctcgagatggacaagtttatggaacgggagaaacaggacatgatgcgtgagagggaaaagaagcaggcagcagcggaagcggcgaagtcgggctcgggttcgggcgtcaattcggtcggtcctggtcgagggtctggagtcgattctggagcgggatcagcaggctcgaggtatgccactgggaggtcgagtcaaacgggcgggtcgaacggtaatcccaacatcgggaagagcgggacgacgggtgcactaggaaattcgaccggtccctcgagttccggtctaggttctcacacccccaaagagtctgggtcgggtacgaatccgacgacttcggcaaacccaccatcgcactcggcctaccgaagtccgtatagttcaatgttcggcgccccccgtgcttcctctgcagctactccgccagcttccactacggccggtacgggagctgcgggccagacggctaccggggcttcgagctcatcgacgggcaagcccgtcaacccgacctccgggattgctggatctggctcgggatcgccctactcgtacgtttccccttacgcttctttcttcgggggaggtcctcctcgacgcaccggattttcgcagtcggagcgagagacggaagagggtcgagatcgaagcggggcgatgaagcgcgactgggacgataagcggaggagaggtgtacctggatccgaagggtcagggtcggggggtccgggatcaaataccggtattgggacacggacagggactacagcggaacctggaaacgggtctggagcaggtcagaaggcggacgaacagggtgggacgaggttcaggacgccttccgctttgttacccagtcccaggccggtcgctagcactcccggacagggccagagcaagacgtcggccgggacagctaggggggagagcacgcaacattcggcagcggcgggtggaccagggtcgactttgagcgcgtccggaactccagggggaaccgctgcgacgacaggagctggtttcaacccgctgacttccagaaccctctctaatccgtatgagcgacccggatctcaacctggaacgcccgggatcaaggtcgaaggaccatcttctgggccttccacacccggagcgatcagttccgcctcggccgcagcaaagacgggtgggatgaagctatcgagcttactcgggcctggtggatcggttcagagcgataggccggccgccggcgcgacgaaaagcgtctcgccgagacccgtaggcgcggcaccgacatcgacgaccgcgacttcctcctccacggccgtaccgcaagccgggctggtgggaggtggcagaagtccatatggcttcatggcacctcactcgggcgcattcgcctacgaccgagcggtcgagcgacagaaggaaagattgaggatgcgagattcggaacgggaatgggagcgggagcgggagagggaacgagaaggtctgagcggaaaacgggagaggagcgagagcgcttctacgggactggcacctggatccggtagaacgggttcagctgttcccgccggatctgggcccaccgccagttcgacgttcgagtcgaactcgagcaggaaccgggatcgaggcctctcattcggatcggggtctggcctcagagcctccgcaccgggtcggtcagggcctgctcaatcgggctacgattattccgcttcgtcacacaaggcgaatcctgccgtggaccgactaccgccactcggatcgtcatcctcatcggctctgctttcattgggtacaccgaccccgctgacttctactatcattgcgacggaacaggagcgagacatcgcgatcgcaaaggagcgcgaacgtgaacgtgaacgcgagcgtgagcgggagcgacccaggcgcgaattgatcgagagggaaaaggagagagatcgtgaacaggagagaatgcgctccgagcgggacaaacgggatcagtacgagcgcgagaacatcaaggagaatgccaaattggcattttacctaagaaatcccaatccgaaacttcctcccctgtatcctccgagggagagtcgtgctggtccggcttcagcgtacacagctaacgcgcccggatcgacgcagcgtcgtagtccctcgaacgatccttccggtgcatccggatcgtctttccaagacgccatgcgcgatagggaacgcaaagagggcatggctgcggcagccaggcggcagatggagctcgaacgcaccgccttctatgaccgtggtggcatgtttcggtcacgtcctgtgggcggtgccgcagacgcagcccgcgataatgaacaagagaccggtagatcgacaccgaaacaagcgatcgaagtgctcaaccggccggtctctccgatcacctcgagcgcgatggcacaaagtcacccggcagctttcccaccagcggtcgcgtttctgcctgcgtccggatacacggacgcagaaggtcaaggcatcaagtctgctcccgcctcgcctccgagaaacgcgatggcgtcggttcgccatggtaagcgtgatagcgaggcgcccgatatggctgcttcagcaaacggtatgccgccagctgcatccacttctaaatctcacaagcgtaaacgatctcaagcctacgctcaagagcctcgcgatgccgaccttgaaagaggagaagcagaccgggggcccaagcttactagcaagaaacgctcgagcaagcacacgagctccgtacctgatcagagagatgctgtccctgccccttcgcaatctgtaccgattgcgggccaatctgcccacggatcgcatggtatgctgagcttgcctccagccttgacgctcgacgtgcgatcggaatcagttgaagtttaccttcgcaacttggggatcaaggcgctcttgcgcttcctcggcaaggccgtctacaagggctgggattggttgctggatgctcagatgctgtctgacaatattggcggcacgatggagattctgattcccggacaataccttccttcccctgtcaatcaaacaagaggatgggccgtgagaggcgagaaagagtgggatgaaggtgtctcggaagccggtagaagggttatgtcgaaaattcctggatacaatgaaagccgtctgtggggaagcgacgtatacaccgacgactctgacattctcgccgtgatgattcattcatcatggctccgaccgatacccgctgcattcgaagcgaggcgagacttgtcagggcggacacctgcatcgaaacaacacacgcggcgatcgcaagacgatctcaaggtcctgattcgggttgcgcccaagctgatccgatacgtggcttcggagcgcgccggctttgctagtcgcggctggggcaatagtcacgatggtgtgagctacgtcgttgaaacagtgaccagagtccaggtgagtgtctatctcgctgccttgcctaagaaacacatccttatcgctctgccacactagtcccaggcgcggtttgcccaatcgcgcaagaacgccaaattgcgtatggcagctaatctcctccagcgacagttggtgtttggacacctgtgcagcgggagcgacaattcgacatggccagagggtcgattcaagggtctgcagactgatttggagatggatgatgggatcgatgagatgacgagggagagcgatctagcctttcttcgatccggacatgttgggtgagtgatagcttcccggtcgggggcaacgaaagtgcgcgctaaacgttccgatcttgcttcaggtctacgtacaaatcctctctactacgttcgtggcatcagcctctgataggcgagcttactactctgcctaagcgggaccagcttaatcctgcctcatcaaacgaccgtgtcgagggcctgggtgtaagcccggaagaaggtgtcaagaagaacatatggataagggatctcgttttggaatctggtagtgaccggtgagtagggccggccgattcaactggtcgtttgtgcccgatctgacgaggatgccgtccgctacgacagataccgtttggctgcagctaccggttcgactcctttgtccccctccttcgacctgactttgctcccccttgcgaggcggtccgactaccagcggcatcgcgaagccgccgattcggaaacagaaccggcggaacagcgagagcagggcaagctggtaaatgaggtcgtcgccaagggcgtgggtcttgacgatctggagttcgttccgactggtttgctggtacgaaatgcgaagacggcgaaggacaacgaggccggggatgatgggtggctgttgttgttggataagtttgcttgggtcgagaaggctgcagtcgatcagttgcggtaataccgaacagctacgcggcgcagcgactgataccggaatcaaaatgaaaatacatccgatgccggccggacgttgccaattcataataaactgatcaacctgcgacctgcgcgacctgaagatgtaatcgtagacatattttgtatataacaggccagtatcaagaacccgacattcttggacccctcctcttcctcttccatcgactgcccgtactagactcaagattgcccctagacgatacgtccgctagctaacaaactcgtgttggtggcgcttcgcggcctgacgggctctggtaagtatatgattgaggccattcctacatgaagttgttattgaacccgagcatcctcttcagatcgctcggctacctcgcaaatcagcctgtcgacatgcagacaccttcagcaggtcgtaaagcgcctgcttctgcccaatccttccgccattctgtcttgttccaggtgaacagccgtccagcaaacgaagaagacaaggcaagggacttagggcctatgggctcatctagaacgccgtcaagtatcaataagcatcgttacgcccagactgctatccctggcaaccaatccctgactgccaatgatcccaccctcccagtacactctgtcagccaaggtactgcgcctggagacgccgagatgaatgatgatcaggcgtacgttgtgagggaatacctggcacaagacccggatatcatcacaacggccggctctgaggatagagccatagcccagacagacctgcccagtggtacgaaccctgaaactgcagcccgaggaacaggtacctacaaccagtcggtagaggagaagcctaatcctagcacacgaaagacaggagagacgagcatgaatactcgaaaggcaaaaaaacaacggcttgagcaagaaacgactcttgtcaacgagagcaagggtcgtttgagtaagaaggtggtgttgatcgaacttgaccctcgtcagccagacgacatcacgaaatcttacaaagattctcgcactaagacgatcgccgaaatgaaagatccatcgagcaccatagggaagctcgtcaaagcaatcgccagccaccgtgccaaaggtgaggaaaaattgctatcggacagtttcgctgcgttcggcaaccaaatctccgcgggtctgtcccctgacggtgccaagatccaacatgccagcattttcaattctctgggcagcaagaatatgaaagacggtgatattcctgatggcaatggagcagatgtcttcgaccagaagctcgatgtaatcgtccagtcagacgatagcgggaatgatctcgacgtcaattggcagcatgttctcacttttggtgaagtgaagtctgcccgtcgtgaagacttgtcagactcactgctcggtcaaattcttcgttatgatgtgagtgtgtgcgagtctggtctacccactactggatcgagttcgttgacgatgcggccgctgtactttactactagcgcaagctcaagcaaaatcaccctatcaccggtcgctccttcttctttacgctatgcggctccgtccttcgcctatggtacacggatccagttcaattcggtacctccgctggctacgatttcgcgaactctaacgattacgaaaagatttacgacatcatcgcgttcctctccggtccgaaggagaaaatctctgaacagtgggaacctcagaacggccagaccattcatgtgaggggcaagggagctcaagataccgaccaatacagctataagctctccgacgtcaggcgattggctgtgtcggccacgatatagggccgtaggaccgctgcatggtccgccacggctcaaccgctgaacaactatagcccatcaccgcccaatgacattatgcatatgatcatcaagagcagctggcttccggcccggctctatgaacatgagctagacgtactcagatggatagaggaaaaaggactcaagttggcgacggatttcgttccgaacataccttttcctgtgggcaccgtcgtgaatgagctagtgtcagatgtcaaggagcccggcacgtggtgcaccatggatggagggacccacaattccacgatcgcgacattctgcgtaccaggaccccatctcgacggccagggctctatcgatcctagggagcatctccgcgtttaccgtggcctggcacaaaccctgaaatacttagcagaacttggtatacactaccgcgatctgaacaacgggaatgtaatgcgcactaaggccggcgagtgcctactgattgattttggcaacgctcgcattctcaaacatgcgcggggatctcacagccgaccggctgcagaccctgcattaatcagccttgatgacagtcgctccggaacgcttgcgtttcagagtcgtagaattcaaaaattaggcggaatcgttgctcgatgcgacagccagaaggaactggtatccaaatatgcctctcttgcggctcaaggcaatttgactcccgaggatgagatttacaggaacaaagctattgagagaatgaagtcgctttccgcggaaatcgattcgattcatggacttcattgttacattgacgacctcgagtcatccatttatctgatgcttttccaggcaagtcgaccgctcatttatgaagctttcaatgtgtttgaacatctatccccaacaggccgcgcctttgagacaagaattttccgaactcgacaagctgtctgcgaaagaggacttctggaacgaaggaatcgaaatcgtgtgtattttcctgcatcgaacatgaacgtcctatacggagcgctaaactaagctcatggcagattgtattcgacatccttaaaccgctgcgagccttgatcctttcgctcaggaatttggtggacggggctcagaaggaattgttgaagcgcgggaatgaactcgacgagctggaagggaaggtaaatcatgaagagcttgcatgtttcgacgcatacatcgaaaagatgcgggagtacgaaagcattctcgactcgaccaagccaccagcgccttgaaccattaagggggtaacagcagaatcttgacgaatgcggatctctcgacgccttcctccctgttccctcggttccgcaaagagcatgtgattccattatatgtgtatatgcctaagcgattatgatctacgaccccgataccctccctgtcccgtttggccatggcctaagtcgaatgccgagccttgttcaattcatcagcctcactacaatggctccagactcctccttggtcctgccggcaactgtcgctgccagttcgctgaaggcgtctggcgctctttcaaagggtatcaccatgccaacttttggttgatattgacccatgataggctcttctagaatatctcgggtgtcctgccccgagacgtccagctctgccccaccgggagtaaggtgtatataggagatggcctttttgtccttcttgatgaacgcccggcgaagggcatgaagcgatgatttgacctgtggaccagaagcaagatggtcggtatcatcaccgaacaaggtgacatatctgagagacaatcctgccatcagcatcgaccgagtcacgaactatggatgcagctaactcacagtccgttggtccggaggacgcgccgagcagcatcatagaccttgcgcccgccgcatgtgtcgagcacgaattcgaacccgctctcatgctggccattcagcatgacaacgggatcatcgacgacgacctctcgggccccgttatcccaggcgtcatcttctgaagactcgacgtcgaccgggacctgtgctacgacatgcgcacctagttgagacagctcttggcagacaagtgcacctacaccttcgtgtgcgttcatgaccaaagctcttgctcctcgggtgataccggtgcaggatctatgagcgaccactcccagcagaggcaagcaagcttgttgttccaaactaaggtgagatccgaccggtgtccgcgcaagccgccgacggtccacgacgataaattcggctagggttccgctctggaaaatggccagtgtcagtatggtagccttgagccatactgacccttctgggcttaccttttttatgtcgacgaggcccatgaccatgtcgcctttggtgatcggcctgacctctgcgccaacttccagcgctcttccgacaaagcttcgtcccggaacccattttccagctcccgtgccagtttcggacttttctcgcaccatgtcaaagtcgaatcggtcgagagctaccgcatagacctgtaccaggacttgggaagtgctgatcttggacggcggcgcttgatgcgcagaataagctacaggaggcggaaggtcgcccaacagatggatcggcgtagtggttgatggtctggaaagccccgtcaacgataatctgcgccccacctgcccgtttgccgagccggacagagtaatgcttgacatggtcgagcttggcataccaaggactctgccatcgagcttgctgcttgtccttgtagggtcagaggatggcttgtaagcccctgtgggcaataccatggcgctgcaaatagccaatcaatgtctcgcacggcagagtcctagccacagccgactcacttatatcctcctcggccgtcttccccgacgccatcggcacccaacagaggcaccgggtcgcctcgggccgagaccgtgtccagtcccgcatcacgttcgagcttttccggtcgcctccacgtctgtgctgcaccaccgtactgactcgactcgtaaatgcttccggcataatgactagagctgccaatagatcgcgccttgggtttatgcaagcctcgcccgtagcgcgaatccgtgtcgtcctcaaagtcgccggcttctgaagcggaggggccgaacgtggacagtcgctgattcatgtcgtagcctgcgggaaatcccagactcggacggaatgactgcgccaagctaaaggacgacgatggtcggtggagtccctcggaacgcggcgtcatgcgttcgctcctgatggaagcggccctggaaggtggtctcgaacgagcataatctgactggcctccgcgcctcacatcgaaagtctctggctcctgaacctcgggcagaagcgtgagcgtatttggcgacagttgataggcgggctcgatagacatcctcctcgaaccccaggtcgtctctccgcccccgatcatgggacctagcatgatgggcgaatctcccgctagcgatggcgatctcgaatgtccgggactcgacggtcgggacaatggggaaggtccaggagtgatgcccttcctcgccagtctggctggacttgtctggagggctggcaagctcgagcgtctaccttgcggatagatgggtacggtagagatgggtgcggaagcctgagaatacgccgacgtggacgagacgacagactccgcgcgccgaaccggtgggtcctgcacggtcgcggcgccgatcattgggatccacctctggctctgttggtcccacttgaggtaggcaggttgatttggatccgagggtggtggtggtggtgttcccatcgaaccgtgggggctgcttgaactcgccctcgacgacgcgttcgaagtgttgacccggaacgtgggccgactgggaaactgatcctcggcttcctcttcttcaacagcgtgatcggaatccctcgcttcctcttcttgcacgccctctagcctcgaaacttggacatctagcggagactcttcctgctcctctttgagcggggtgggtggttgtatcgacaacatggggggcatcgcctcgccggccgtcttttccctgtctggggtcgcatattcatcctcgacctcgcgacggtatccttcctcttcgtctctttcgtaatcgccctcgccgtcactctggctacgatcttcctcctcctcgacgtaacctccagtatacccggaccctcctgaccgggggaccatcctgtaacttctcgatacgcccgcgatgggtcgagccttgtggtcgatgttgcccttgtttacagacgaggcatctgaccggtcatcttccgattcgaaccctccctcgacctcgggtctctgttggctcgccgtcagcgtcgtcatcgctggtccgttcccgaccgggctgccggaccccctctgcgtagacatccgggaaagaggccgcacctcgggcgtccagggagaagcagcgtcgtagctcctgtgtactgaactcttggcgcgaccagattcggaaatcggaggtgtcgatccattgctgtactgacctgtctgtcgagatccactcatttgatattccgagggcgatctcgacccggaatcctccatccttgacccatcaccaaacgtcaggggagacgcccgacgggctacctgaggtgcggcaacgtcgcctggtccgctcggacgaggtcgtccgtacgtatcgatcgagacttgtgaggcggaccgggacgttcccacttcggaaaccaaatcagatcccaagtttctctgggacgggtcagtccgagcgtcatgtcctgcatctagatgtccattcgtttgtccgttcctcgctgacgccccacgcacaggctgcgcgacgacgacgggggcgacgacctttgctttcttctttttctttttctccaccccctttgtagctccacctgccaacgtcgaacccggtgcggggggagccaagtcgaggacggaaaacgcctgaaactgtctctccacgtccgtccgcttcttgacctttttgggtttcccgttcgtcggcgacaagaccgaggcggaggaggaagatttcggtcggaatgtagggaacggggtgtgatccaggtggctcgttgcttgttgtcttccttgttgttgacgaccttgcccatcttggggaggaaacgcgtggtctaccgtcttgacccggtttgtcgacctcctcgtcagcccggcgtcatcggcctgacctcggtcccgctgtcggtcctcctcgtcttcactgctcgatgaattgtgtccatatccataaccacccgaacgttccgctatctctcgatatcgcctgtcctcgcgctcccgtcgagctcgagtttcgtcctgtccgacggggtagcccgtggcagggtggtagttggacgtctgcgtcgtcgcgtacgaccgggaaggtttacggaaaccaaacaccatgtcgactcgtctcgatcaatatctttatggacaagaggatggatagtcggaaaggtcgtcctgagatcaaagacgttgcgaagtctttggtttgttggtcttttcgtccggaaattccagcgtcttggcgatgacgaaataaaggggtaagagattcctcttctcggacactggggcggtcgtcgagtataacaggattcacaggctctgatcaagagttcgtcaagtcgttcaagacgtcactgtcatggattcgaatcccattttcaccagtctccgtcctgtctattctccctgtatacggcgactgggctaccaagaaacacacggatggacccagctgatgatcgaaagagatggacggatgtaatttatacttccgatcaatgtcaatctgctgcccttcctgcgtcttccactggctttaagcgaccaggaggctgaccgaagcagaagcggcagcagccgcatcagctcgacggaaaaagaaaaagaaaaacatccgtccgttcgacaacaaccttccgttcgctgactgcagatgaatttggatcgactggtacgaatctcggacgagacacaaacgagacgcgccactgacgtcgagcgtgcgacagtcttcacgcatcgcatcacgcatgatgtcgtgatgcgtgatggtaacaatcgaaagcgtcggaccagcataggtggactcccgtacgctcaacagctaacaaggtatactcccactgcccgattgtaggatgcgtcgtctccaccccaacactgcccataacttgatagcctgagccatgaacacgctaccgtctaaatctgacgacgcccttcgtctacgacaactcccgagctcctttcgaacctgagcgtacgcacgcctgaaacgcgtagaccgtctcgttgatcttcaatgcctggaggtcctgtcttgtcagaccacgggggcgggaccacatcgtaagaacgagtcctcgcctgcgaaagaccgacacgagcatgcacattcctaggctcctgccgtgatcgtgtgatccgaaagtgctggcatgacattatcaatcatttccataaagtctcgtgtggcgcgtaactacgaaatttcatatgccgcccttttgagccaggaccccgatgtctacccctcgcacgaattggccacattcaggtcattgaagtgatccgagcgtcccgtcttaatcgccttcagcgtgtgaggctagatccggcgccttgttccacaggggcagattcaatcggtggaaatgcggttatcgcacagtcagacgggctggaaggctgacgagacgatattctgacgatacgccgatatcgaccgatacagttcccgcagggacctagaggaggagaggagaggatgctgaggtcggaacgggaccgtcgcaagtactctccgcctcgttctcctatgtgacgaggagcacgtgatcgcattttactcacccccctgattgaatttcagatattatctcacgcatgatcgaacgagtagtgagggaagggcatctgagaatttgctctgctactgaaattgatgatatcacgattccaatcattgcgggtgagcgccaaaggtgtgtgaacctgttctgtggtagacagatctcggcatcgatccgctgcccttgcagcgattcagcacaaagccatttctctctgagccactactggactggatggtcttcatgcggtttggatggttcggatgattcggactgatacatggaaaggcctcctgccgatagtgcacccctgattgatatgtggccgtgagctagatcgcgggagcagctgcgactgttagcagtagtgatcgtatcaggcaaggtgacgaaagatttgctggagttccctccgatagcaaggacgccatgctttctaccagatcggtatccatcgcgagatgatgatacgctggccagaactttatggcacagaccgacagtagcttcatcgtccctttgctaacttgctgaatcgctgaaacgtaccgagtcggtactcctgcacgcgctctggattcgtcacgatcgacgatcccggtcgacgagcagtctgtggtgaccgggcaggtgcggtatgaggccatgcacgtcctagaacaatcgtcgcttgtatgcttgatctatgcgtctctagattgcacagccgtcttcacacatcatattttcagtcattcaagagcgcataggtagtacgggaattgtgcaaaagcaggagccttctggctgagagcgatgtcgcacacgcataccttgtcatcagcataacgcccaagaacaggctagctcatcatggcatccccagctccttcctcgttgttcaacgagaagcctctcttgatgcggaacccatccggctcgggttcagccaggagtaggaaacacaatccgatcctccccttccacaagcaagtcatcaaggagttggccagtccggaagaagatgatctgctcgtcatggccaagggcctgggcatgcgacgggtgagcatgttcgccgagcgacttggccgacatgagaacctgatatgaccttggttacgacgaatctttttccctatagatcatcacgcacttgctgaagctctatgatgctcagagaaacctcgtcatcatcgtcaacgcctcgccgtcggatgaagacgggctgggagaggatctctcgaatctgggtgtcagaaaacctggattacgccaggtcggatacgagatgaatgcaaagcagaggtatgtgctgtcgaaagaaagtggatggcctcgatgagctggctgacaagacttgcctcatctgaaggaaacaactatacgaatcagggggtctgatctcggtgactagccgaatcttggtcgtagatatgctcagtaggtcattcggataccagatagccttgcttcgactgactggattgatcgtttgacatccggtgtagccaaaaacatacccacggaccttatcaccggattcgtcgtgctgcatgcggagcgtgtcattcagaccagtttagaagcgttcgtggtacggctatatcgacaagccaatctggtacgtatgccgctcatccggatccagagatctgccgacacacgtggagaggctgtaactcatctcgctcgtcctccagaacggctttctgaaagggttctcggacgaaccggagagctttagctatggtctcagtccaatgcaaggggttatgaagaacctctgtctgcgacgggttcatctttggcctcggtgagtagcaaagtctcgcttcttcagtcgctctcccttgaattcgagagctctttgcagatttcatgaaaaagttcaagacagtctccaagcgaggaaagcggatgttgtggagctatatcaaccgatgtccagtttgatgcagcagatacagggagcagtcattgaatgcatggaagcgacgttgggtgaattgaaacgtagctgcaccaacgtaagtaaaatcgctcgcacgcttcggcaacatgaactgacaatgctcgagtctaggtcgatctcgatgacctgacggtggagaatgcgttgttcagaaactttgaccggatcgttcgacatcaactcgatccggtctggcatcgagtcggtaccaagacgaagagactcatcgccgatttgacacagctgaggcaattgctcacgtaaggcacgagtccttgctggaaccattttactactctgacggggtcgactcgctgctcgtcgcagatacctgctttcgtacgattccgtctccttccactcctacttagagacgatcattgcttcgaactctacggacaaaggaacagcaaagcagaaccagagcccttggctgtttctggatgctgcaaatacgctcttccaatcggccaagcggagagcttactcgacaaaacctcgtgcacctcagcttgctcaagcgaatggcactatcaatagccaagatggagatgaagccgagtgggccgaagttcgcgcggccgaggagcaagagaccgcaggggcaacaacggcacatcgcactgaagggcggagatcgaatactgctggaaaatggccagaaggcgtcgagcctgtactggaggagcttccgaaatggggtctgcttggacaagtactggaggagattgagtcccatatcgcgtacgagccgatagattcgggtaagtctccacttttataggcctcgcgaaccaccctccatgtcctgataccagatctgcagtccatccggggacgaatactgttttggtcatgtgtcaaggcgagcgtacctgtacacaactgcgggaatatcttgcgacaatggcgcctttcgttcccggcatggccgagaacacggatcaagctggtagacagatgatggaaagactcctgaggacgtacttcttctggaaaaacggtctgcgcgatatcagccagaatttcaagaagaggactacagcaatgtcagcggaagatgcctcggcttcgacgctcggccccagtagccccgctagaggaggagcgggttatcaacgaggaggtcagcctcccaacaaaagacggcgagttcgagcctccagtttggcagcgagtgtagccgatcggaataggcaaaagtcacggactggggaagagaaagagatcgcgatggaagctgaaatggaagaggaagccggaggtatcgctgacttgtaggtctgagctggctacaacaacgttgcctctctgagcttggacacctttcggacagcatgaaagcgtctcagccaccggccccgccagatgactatgaggaagaagaggaccctctcgctgtagtggatttgaccgacgaaactcagcaaaccctgctcgcaccttccgtgcagcaaagtttgacagatgactttgatgaagctgctttcgaatcgcactttggcttgataccggcagaagatctggtcatcatccggccatactctggggaagaggacgagacaactcttcaagatatccgcccacggttcatcgtcatgtacgatccggatccagcattcatccgacgcgtcgaggtgagcgtcagcgtgctaacgaccttgttcgcaccgcacttaacggagggttctctaggtgtatcgaagtacgaatcccggcttaggtgtgcgtgtctactttatgatctatcaagattcggtcgaggagcagaaatacctgagcggtctgaggaaggaaaaagatgcctttgagaggttgattcgagagaaagctgtgagtaggctcggaattaaggacgatcggttgcgtagattcgattgatccgatttttttgcagaaaatgcttatacctatcaacatacacccacgagcaccgcacaacctggagagccgggctcgaaccattagcacccgaaatgcgggtggcgccgctgcggccgagatgtcgcgcgtcagtgacgactacaggttggtggttgatcgtgcggctaaaattgatcactcattcaggtcatcgtcgatatgcgagaattccggtctaccctgccttcgctactgcatgcagctgacattgaggtcgtgccagcgacactccaagtgggagactatatcattacgcccacaatgtgtgtcgagaggaagagtgtccctgatttgatacaaagtttcacttccggaaggctgtaaggagatcaggttgagcgcttgattgaaagccaaattgatgactttgcgttactttgtaacagcttcacacaatgcgaggcgatgagcgtacattacgcacagccaattttgttgatcgaattcgaggaaaacaaatcgttcaacctcggcgttagtccatcgcgaagaccagcatcagtgcgactgagaagctgatcttgtattcgttgcagacaattgtggagtcccgctcattgcctcggccttcgagagagaaggatacgcagccgagcaaggagggcattgacctgactagcatcaacgccaagctggtgcttttgacgctatcgttcccaaggttgcggatagtctggtcatcttcgacgcaggcttccgttgacatcattgccgacctcaaaatcaatcatcctgaaccggatcaggctaaagccattacgattggaggagaggaggatacagcagagctgggcccagatgcggccggaggagacagctcaggcctcttcaatactggaccggaagagatgctgcgcgccctcccaggggtcaattctcgaaattacaagttgatttccagccgaatagccactattcgcgagttgtgcgagattgaagaccgccaaaaaatgcaagaggtcattggagacgaagaaggtggtaagaatctctacaatttcctgaacaaagacagccgatagcctcttggtaagaatgcgttaccgggaagatcacgttaaccgtagcgattctccgcaaggcgagcttgtcaaactgtatcaagacgtctgattgaacgagtattgcatgtattggtagaaaattcgtctgtgcgacaccaaatgcattgcggacaaatctactgtcaccgtcggttagagccgtaacctctgttccgcccagaatcctttctgcgttcgaccttttcatctttgagcgctcgagcttttgctttagggtcgattacctgaaaatttgtacaatgtatcagatatgctcgcgttgctttggttgctctcacgtcagctcaccgtgtagtcgctttctgcccttctagtttgttctgcattatcgtccttcagagctttcaaagcgtggctcatgaagccgatatcgtcatccacttcgagcccaccagtatcatcgtctagacgcctagtttcttcgctctctctgccatcctcatcccgagcgatgtcgttcgttcctgcttttctgatcttgcccgtgaagctgctgagagcactcagcacgtcgtcctcgtccttcttgccactacgtttgccgcgacgtccagccgagtatctggctagctcttggtccaagaacgagggaccggagcgtttcttcctcggtccatcatcatcagagtcgtcagaatcggatccgcttctccgcttgtccagctttctgattttcgcttgcatctcctcgatctgcgctttccgtgcgtcactaccagacaaagtgaggtgagcggtacgtctcgcctattttggcaaaacaattatgactcacgccgttccctgcttttcggtttcgtgcttcgccctgataccagatatatcgccggtggcttcaccgttcatcgactttcgtatggggcgattcagctcgaccggcttctttcctatgtctcgtagcgattcgggcagatcgacataggtctgtacgggtcgagtcgatgtactgccctcccccggatccacgactgcaaagcaagggaattagttgtgttccggttggcaatcgctcatcgcggagcttacaatctggtcgggccatgaccttcttcttgcctccagcaatcacgccagtatccttgtcctcctcatcgccgaaactgagaagtccggtattcctatcaagccacatcggggttcagtgctaaagatctcatcgctacgatgggatctaccgacttttttgctcctttccgcttatccatcctctccctctcggcagccgcagcttgtcgcgcagcgagctgctgccgcttctcctccgcggtgatcctgggcacgatatctgtgaaagggttctccacgatgcgtgccgacgtaatctttggagggaagagcggccgttcttgcttgtccagctcgaggttcgcgatcttcagaacatctgtgttggacggtatcagcgcagtctgtcaggcagggttccggtggaaatgttaacaccaagacttactatagatcgtaggtccgttgaccctaccgaacaaggtgtgcttgttctgcaactcatccgccctgtctgttcgttcgggacagagcgcgaaagccagacgttgagcacggattgcatcagtcgcacatctcgaacgtgaagccacacacctagagtgatgaaccattgactcgagttcgacttcttgtccccgttattcgcaaatgccaacagacctctccggttgaatttcagcctggaatgagtctcgttttcgaacggttctattgagagacagctacagtatcagaatgataaaaccgttgcctctctctgaattctacgcacctccgtagaatgactctccacccattcctgtgccagttgggtctccggtctgtgcgatgaagccaggaacaatccgatgaaagatcacattgtcataataacctgtccgggatataatcagctttcggaacgtccctctctccttgaggaatagagatcaccttccatgatcaatgcgatgaaattcctgcatgcttttggggtctccttgcaccacaattcgatctaagtgtgtaagaggtcagctggatgaagctggagcgcgcaaggctatacgtcatatcgtcgcgatgtacctcgatttctcccatggttgtctcgatgatcacctttcccgtaggaggcggctagatcaagaacagcgttccaatattagctgttgttccctctggtcgaatagacgctgacagacctcggtcgtgtacctgtttggtagggcttgaagattagcttctctgagaccggtcgtgccaattatcatcgcgcctacttacaagctactcatactgaagttcttctctcgttttcaggttggaacaagcgctgcggagctcaaggatgtctggtagctcagtaggtagctatatctagactcagtcgagctgcagaaatttcaaaattgtcaagtccaacgaaacgacctcggcgacatgcgttgattgatcctcccccgggttgcactcagatattggactagaagtctcagctcatactcgaatgaatcgctgccgacctgccatcaccgatacgagctaaagcttaacatctagtttggactagatccatgtttgcacagcttcccatctcccggttactttggcagacttcgtagcgctgcacattattctctcggctaccttgtagacgtccattgaaggctccgcgcgacagatccctgctgccatagctccgggaacgatcacgtcaagcaagcagagacagacgaatcggcgcacgggatgaggttcgctatcccagattcagatagcgaggaggaattcgtcgtacacgacacgcccatgtgagttggatcgaacgtatcagaaagtctgcagctcctatactgatgacggctaccgctcgcatacctagccgcacccgaggtcatcgcaaggctcgcgaatcaggctttggagtcccgaccacctccgaccgaagcgactctggctcgtccagtggtgctcaagcgggttacacatccactagcgacgatgatgaagatgtggacgactctgtatctatcatgtcttcgggcgacgacgaggtggattacagttttcgataccgcgagcccgcagcatttggcgtgaaaacgctctctacaccacgttcgacagcgatacccgtagtgcaattacccaccctgactacacccacgaccccggtgtctcaaaagacgaggctcaagatcagtttgtcaagacgggcaaccctgggccagaaaggaggcttggcagtgcgggaggacgagtgggagcgatgggagaggatatccagggagcaggtcatggtcagtctcgaaaccgttagctcatatgcccgcgatcgtgctgacagtccggcgagtctcgtcgtatagctgaaagcccgagaggactcgctagctttcaaccgggatctcgcgtcgacaccggaaaagatcaaacatgcttctcacctgcgcaacgcacaggccatgactgagatacagtcactattgtcgtctctcgagctcgaacggacggaagccgacaaccaggccaagcgagaatttcacgctcggaatcaactgttatgggatgggatcgaccgcacgatcgctgctgtgcaagcggagaagaagcggatagcagaggaagagcgaagacagcaggagatgcgacggaaacaggaagaagacgctcagaagaaacgggacgaagagagacggaaggaggaagagaagcgtaaagccgaggaggcgaggcgaaatgcagaaaacgccgagcgagaacgtcaacaggctgaacaggccaagcgggatgtcgagctgaagcaatctcaggccgaggaacagcagaggctgatcgaagccagtcgggcaagcgccgaacagaacgcactgacgagtttgcacaagaacgaacaacggttggaaaagtgggtggaacatcagcgaaagaccaagatcgaggtgatcgagcaggtcaaggcggatgacgggctgagaaagaacatcggcccaatcaagaggaagattaccaggcggattgggcaaattgtgaacacgcgggaatcgatcgttaatatcgtgagtccaagctagtggaattgaagcgatgtcgcttttgttgctaaaccgacctcgttttgcgctctttagacgcaggctatccacgaggatttctgtgcggtcctctctcgtcaagtctcggcggcggagcctgtgccgttttcgcgtgaccttcccgtagcgtacttgtatctcttgtcgcacgtttccaagtcgctcctgcatcaagctgagaacgaggtcctggcaaaggccgaagctgcatttccactggccaaattggtcatcgggctgatgcttcgggggcacgcggcgctgggcgagatcctgatagcccggtttgtcaaaaagtgcccctgggtcttgcccttttacccggccaagcgtcaggtgggtgcgaccatgtgaagcgtgcggagatgagccgatcctaaatgttctctgcgtaccctacaggaccaatctcaaaaggattacgaagtctcgctcggccacaagaagggcgatgccaacgaggacacggtgcagtacaacaatcggatgtcggccatcgtcacgctctatctcgcaatctgcgcgaccgacatcaagacgatcattccgaccgtgttcccgcaaccgcagagccagcaacagctcgacaaattgatccaagccaatttccggacgtctattctatggatgtggatggcaggcatttgcaaacaacctctgccagccttggaaaccgcgccacaacttatggtggcggctttcgagatgacgggccaagaactcgtcgctgcctatggcacacggcaagtcggcaagatggtgcaggcgattctcggacagggtctcggcccagagaacgccaaggaaggaatcatcgctcaaaaggcactggcttcgaggcaacaattgcgtcttgtctgcgagccgttcatggcaaacggccagttcccagacaacccggccaagatttggaaagcatgaaagaccgcttgcacgaccgctcacgaccgacacgacgcatttggagatgtagcgcattcaaattgtatatcaagcctttttgcttcccgcacattatcgtccaaggggatcgacacaaccgaattgattttcacacagaaaccttcacaacgcactgtgcagccgatcgagtgacacggttcacttcctgttcttctggaaaaagtggatgagaccggtggtctggccaggcagcgcaagaaggggctcaagtaagcacggtatatccaggcgttcacgtagaagaacccggtcaacgtaccgagctgtcgtgacccttgaccttgtcggcgtccccgagctgggccaaaatgttcttagccaagacctgcgagattcatgatcggtttgtcagtggggaagaaggcggggaaatccaacaagacagggggggggggtgaaatcacctttccgagctcgacacccatctggtcgtacgagttgattccccaaatggctccctggacgtggatcttgtgctctgagtaggcgggagatcgtaggggtcagtccagcgtatcaacggcgaatgcggcgcaagaacatgactcaccgtagagcgcgatcaagctacctagagtcttgggagtgagcttctggaacatgatcgagttggtaggcttgttgccggcaaagatcttgctcttgacgagggcatcgttcttggcttgttcaggtccgagctcctcgatgacctgctcctcggtctttccgaaagcgagagccctagacgcagtaggtcagagcggtcagttgtcgagcggaagttttgttaccccgcaagactcggtcaaacatactcgggttgggcaaagaagttggacaacaagatgctgtggtggtttccgatcttgttctgggtctcgacgggggccaagaaatcactgcacggggaggtcgacaaccagatcagtccatgcccatacgagtatgaatcgtagcgatgctcaccaggggatcaacttggtaccctggtgaatgagctggtaaaaggcgtgttgctacgatggagatggtacgaggttcccgatcagcgctgggtcccgatcatcaatgcatagcgctgaacaaggtcgacctaccccgttggttccagactgtccccagatgatgggctgtatgacacccccgagagaattcacgcgcgacgatcagccctgctcgcgaaccgaccctaatctcgacgtttaatcaacccaccccggtctggtatccgacgacatcaccggccttggtcacgctctttccgttcgattccatgtctccctgctggaagtagtcggcaaacttgtgcaagtactgatcgtagggcaacaacgcctgggtctgagcacctgtagaccgcacaacatgctcgattcaatttcggattccgggcgacggtgacaatgtcgtcgtctcatgaccacgccgatgcacgccgtgtacctaccgtaaaagtcgttgtaccagatcccgacgagggccaagatgacgggcaagttgtcctccaacttggtctccttgaagtgcttgtccatctcgtgtgcgcccaacaacaattcctcgaaattctcgtacccgatcgacaaggcgatggacaatccgatggcggaccacaaggagtatcgtccaccgacccagtcccagaacttgaacatgttcgaggatgagatcccgaacgaggtcacggccgaggtgttggtcgagagggcgacaaaatgcttggcgacgtgctccttctgcaacgtgttcatcaaagacgaacgagcaggggggccgtgtcagtcatttctccaggacgaactcgcaggcatccgatcgactcacgtccttggcgctggacaagaaccagtccctagccgactcggcgttggtcatggtctcctgggtggtaaacgtcttgctggcgacgatgaacagggtcctctcggcatcacacgccttcaagacctctgcgatatcagacccatcgacgttgctgacaaagtgcatcttcaaatctcgcttcgagtacggcttcaaggcctcggtgaccatgacgggtcccaagtcggaaccgccgatcccaatgttgacgacgtcggtgatggatttccccgtgtatcctttccactcgcccgaacggacggcttcggagaactgcttcatgtggtccaggacctccttgacctcgtccgcgccttcctccttgatctcgaattgcccggaaaagacgtttcggagcgccacatgcaagacggcccgaccttccgaggtgttgatgtgttcacccttgaacatggcgtcccggaattcgggcaccttggcctcctcggccaatttgagcaaggtcgaccagatctccggggtgatcaggttcttggagtagtcgagcaggatctggtcctgttcaccggaagagggcgactggtagagtcgggaaaaggtctcgaatcgagaaccggacgaggcatcctgtgcgaacaggtccttgagggtgagcgaggcgtgttgctcgtcgtagatcttttgcagcttttgccacgaagcgtagtctgtgcgatgtggatggcatgcatgtcagcacaaggatgaagaggtcgttcggatgacggatgacggatcaaagggcccgtgctcgtagctgttctacctaccggtagcaggtcgtccgtccattttttcaacaagaaatcaagcaagcgtgggtagttgggtcagtgtaggttttgtgatatcaacgtgaacgagatgtgattagcgttatgagatgtagtgagattgtacttttgtaaagtctctgtctggtctgtctgactgttcggtccggtgagacgtgtgattgcgtgtgttttgccgtcaacatccgtgcccttgcctcgctcgccccgttgccctttgccatcgtccatccatcccccgcgtaatcaaccacgattcgtattgccacgacgagtctcggctcaaatacaatgtcgcaatcatctcacctaatctcccctcttttgccaccgagacagacccggtccgaccgtcccctcctcacgtaacacgccgactcgctcttactctcacatggtacatcctcatgcatcatgcaacatgcaatcctcataaagtttcgtcacccgctcgtccgttcatcgaaacgttcaacctgtcgagcccgaaatcgtcacttttccagtcgagacgagtccctcgacatcccggtccgggcgcctgcttgtaccgagccttacaccgaaaacacgccgaacatctcgccgtaccaccgtacttgagcaatttccgagacgaaatcttcgtcgtactagcctctacttgataatccacgtgcacagggtccctgaacaggaatctcagcgtaaggataatgatcagacgagacgtgttatatgatacagtttatataggtatttctcccagccctggtgtaagatgcaacgagcaagaaagaggaaggaggaggaggcaggaactgtaagggaggccggtggagaggcgtggaaaacgtagacatgatgctcgagattcgagttgaccttgggaggtggacgtcggcaggtttgatgacgagggcaggatggacgggcaagtcgacttgcaaagagggcggagatatggtgctcgacgacgacgacgaggggaatcgatatcgatatcgatcccgatccgactttctcatcgacctcccttcccgcccctccctcgaccgcgacccctgttcttcttcttcttccctcgtccgctcttgccaccaccacctccattgtttccatttccaccatccttgttatccgaaccgggcgtagtcgtaccagctgcgggctcctcctcgttcgcgttggcgttggcgtccgcgttctcgttctcggtctccttgacggcgacggcaacaggttcgtccaccacggtagacccggatccgttcgcgggttcagcctcggtttcgacctcgacttcgacctggatcggtttgacctcttttgacgtcaaagtaggcaccgccgggctcggaacggcattcgcacggctcgacgactcggtcgtaggggggacgacgacgacctgttcgtcctccttttccttctttccgacgctcttgacgctcgcgttactcttgatcgtgcctacggcgccggcggcgttgctcccgagagaccccttcttgcccttgcctcgctctcgttcccgttcccacatcccgcctaggttcaggttgacccgacggacgccctcgatctgagcttgattggattgggagaacgaggaagacgtgctactcctcgatcgaccgagatcaggtcgagcgaggttcccagcaccgttcgcgtcttgctcctgggcgcccgcagcggacgtctcggcgggaggtaacgagatgagaggtggagcctcgacaggttcttcggccacggaagccggggacgaggtcgtagatgtgacagcgggcatgtcctgctttgtaggggtcggacgacgagattgagaatagtgaggagccaagttggattgaccagggtgattgatcgagatcatccggctggcgtggtcgagacccttcttgtcagcaccagggtgaaaacccgcccaatgtacccgggaggactcacttttccactgcactagcgatgctctgtaccctcaacctcccttcttctcccaaaacggcatgtccttgtcctacagctccgtacccagttgtactcccacccgcaccaggctgaggtgcctcgtacgagacgaccgactgcggcttgttggccgtgccagtaggagttgtagtcgattcatgcacgctatgagctagcaacgagttggtctcggagcccgtctacagtatcacggacagcgtatcgttaaaaggaaacaccgtcagtctgcgttagattagggttttgatcatgtgcttatctctgactcacgccttcctcctgtctcgttcgtttccgagggaaacaacaggcaaacgccgaccagatcccagacatgttgtcaagtatgacaccccgtgtccctctgtatcagatgtctatcgattgcagaggtggagaatctcgttttggtggcctctgatcgatgccttttgccaagaaatgcgaacgagagggttggattcgcagagcttgatgacctcgaaatggagtctagccacaaagagaggcaagaagctataccaagcacttcttctgcgagtgaacgaaaacaatagcgttcgaaaaggtcgactaacgaaatgagaagacgtgccctgatgatggtttgatcataccacaacctgtcacaggtagtttttccaagatgccgcacccggtcgacgagctgagcgacccagacccgcgcggggtgaatggaagcgagaaaaggtggccgagacgggtttcaccgttctgagcgtgacctgcagaactattggacgatttatgtcactcgtcacggcaactcgtaggattacaactaggtcataggcgggccctaaaaccattcatcatttcgctagatgtatctctcgaaggctctggctggccgtcccgtacgctggtcgcacgagcaacgcttccttatcgctcttcacttcggcctcgtctcgctcttcatggcgatcgacgattccgacagacccgacgctcgtcctcctccgatgctctgcaaaatagccgtcttccacttccgacccattcgtcctggtcaaaggcgaaccaggagtcgttccaggcgaatccctcgtgcccgcagccgattgggcgatcaccgcgctcacagccgtcgtcggcgtccctggcttgaacatcgtgtctgccccggatctggctcggattgacaggattgaagcgctggatgacgactttcgactcctcccagaatatcgtacggaagagggctgagagggcgaactaggcacgatcgggggcagctcgagttcgacgtcttccgtcagcgtcgccgacgattgcttggggaatgggatctgtacctcgtccccttcatctaagggaatcgccgaaggcggcagatcgtccacgatgtcttccttttcgtctggaagctcttgattttggacatcctcttcttgaacctcttgttctgtgacctcttttgcgtcaacttcttcgtcttttgtggtcgcagttcttggaagcccctcgggctccaagtctttcagcatttgagatggttcaaatacttgagaaggcctggtcacagtcggccctgcgacaagaaggctcgccggttctgcggcttcagcgaatatctccaaagactcgggacggggggtggcatcgggctattaccagccggtcagcttcacgtcatctgtctcgagacagacactttccgaacttacttcgtcatcctgttgttgctcctgctctgctacaggcgagatagtatgttcccggggaatgacatcgtctttgtccatcttatcgacaccggctggacgcctgtggacaacaggcgagctggtctcggtatcaaattggtgctcgtggaggccatcaaagacggaagtcaacacagcaacaagctctaccccagccttgttcagctgggctagcatctcctttgcctcctccagaccggtgtggacattgacgagtacgatggcagcttctccttcatcgtcaccatcgtcctccggatcgacctcgagacactgttcaatcaagctgttgactttcgtcatggctgcatctgagcgaagatggatgtcttcagctgtagtggctaccgattgtatgttcttggcaaggatggcacggtcgttcccaagagcgtctgtttccgctcggcttttggcgcccaacgaggtcaacagcttgatacaggcttccaacatgattttactgcgctcatcggacgttttgcgaagtttggcctgcaagcgattcatggcgattcgactgggagtgccgcgatttgattgtcgcgtcgatgtcgctgtagacaagaccgatcgagatggcgagggcgcgcgagggacgacgtgggacgtgctaaagatcgatgaccgggaagccgtgaacggtccattctcgcggatggtatgagcattaccatctgagggtcgctgatagcgagccagaggactgtctggaagaccatcgactccattctcgtgacgagcaggcagatatatcatgctttgccggtatagacgcagatgagacagggcggactttggctcttcgatgtccctcaagtatgacattgaggtcgaagaccgcatcttccgactggcttgagatgcggcccgaggttcggacgaaatgaagtcagggtgaggtctacgaagattttctaccccccgtatagagtccaatgttgaagatctggcgggggtatgcaagccggtagtaggtagtttttgttgaacagacgattgtaatagttccttgcgacgacgcctgctttcggccagatcgtcatcaccagcgatattattgctcgagatcgtgctttgaggacgagaccgctcgggagtctccgagaatgtgctgctccgcgcgacccctgccaacctgctggatcccgataccatagaaccagacggggaggtactgcttctgacatcacgatgcaaggaacgatcgttcgctgacagcttggccaatgcttcgcatcgaccagagacggacgcgctgatagaggatgatccgaggtctctcgacctgggctcctgggtagactcgtttcggccctggtatcgatccatagctgacaaacgggtcggcgtagactgttgtagaagcagcaccagattcggttgatattgagcatgtcgacaattctgtatgtgggatgcaggcactgaccatatcgttccgaaactcggtggggagcgcgcttcttctccttccagacggatcgtcgcccgagccttgacgagcgcttccacttctcatccacatgtcgactttttccacagcaggcatctcggcttcggttttgatatgttcaaccgttggaagttgtacttgataacgagtagaggccggcctgggggaacgttcagcccgcgactcgctgcgtgtaaagacatagtctgagggttccgccgagtcggacgctctgggaagctcatctgcaatcgctcgagaccgacgtttgctttccagcttgtacgtcaatgtatcgtcgtcttgattcccggagtctcggaccgtgctattcgaaacgctcctcccggcgctgctgccatcgcttcgatctctcgaggaccggtaaccgtttcccactgatagacggtcgtcggtcccatatcgagcgctatgcctgtcagaatgtcctagatttcggcgcgccgtggcggaacccctcccctctagtttgacagacgcagtcggagtaggtgtcctcgctggtgacatatcgttcggcgaggagtaggcgctggaccggtaagaatacgcaggctcggggctggcccccagataccgtttctcgcttgatgatccatgctgaccgttcatcgtattacgcggactgctgctttccgcatagcgagagtaagacgtggaaggctgatacggtgaatccctcttcgccagtaacgtctcccgtttttccaagtcgaggccgttccgctccgatcgcatagatccgttcaagatggtagagcgccttcctaggccaacatcagcgactccacctccgggtcgcgatctcatggacgagctacgagacagcggagaagccgagctgctgctctgtaaactcaatcgattcaagcgtgcccgaaagtcgtccagttcgctgtgatggggggagggagaggccgactcgtagcgggaagaacccgcatgtggttgtcgagcagcatcgagtgactttctcggtcggtagctagaaggcggtgtctatgcagtacatgccgaatcaataatccagaactaagtcggcaagagcatttccaagcgctcagaaccccccttgcagagcactcacctcatgattccgacgtgatcgcgggcggttgtccgacgagtaccgggttggagtgtccatctcgatctctggccgcgctcagcgtcccaacaggatacgtgcgagtagaagttgtcggatccacgaccaggccgtcgaatagctactggctactggctcagggcagtcgttcagacgaaggtcgccctatgggccgtaagttagatagaagatatggtcgaacttctccgcgtatcgcaccggcaggttgttgatcttttcgatgatgtcttgctcttgaacagcttaatcaggaagaaagggtcaggtgaacggaacatcaacggtttgaggtctgccccacccgtgtagattgttcacggtagtgttgaagacacggtaagttgcttaatggagataaatgaaggcagatacaggtcatgatttcgttacaaggagatcaccctcgatgatcgtccgggtgcatccacggtcgtgttatacaagccaaaagtcccagctcagtcccctcgagtagcctttctatccaccatgcgcaagctgatcggcaccctctctccgtccttggcgtcgataagaacatcgtttcgatcgctaggtatcgtctgatgactgggttgctccgggaagaagagcggttcgccgtacatgccggcgagagctacgaccatgccaaatgttccgatgtacatccgtgttcggggagagagggctggtatagcaaatcttgtcgttagattagcatgtaaccgtggagctcctcccaatggcttacagttatagctctgccatacccccttctttgccggaccgctcgaggcagtcgtgtgcttcacatcagctgaaagatcgcgaacgacctctcccgtaggagaccgcttccacccggcttttaacggtgctcggggtagtccatgctgggacatttcgtcaatgagcagtcaagactatggaatagactattgtttgttctgataaccagcgctggagccgctcctgagtccatagtcctcaagtgcaaaggttgccgatcccagtgcacaaatctgcgtgctgaacagggctgtcttcgggcatccgcgcctccaggctcgagcctacctaagacgtgaaattccggacccgaccattgcgaagtgcagtcatctgtgacatgttctgctttcctcggcggagctagacacgaaggtacgatctctaaataacgtcacgttaagagctaacaggcagctgaagcttagacgcttgcgaactcatgttacacgaattgatatcaatcccaaatcttcacttccacgtatacatctctcccgtccagtcatgccgtcgctctcggcgcgcactcgtggtctcgcacgtatgtatgaagaacccggtacccatgctccgtctagcatctatttctgcactcgagtgaagacggggctcttcttttcatgtacaggaacctctccctctggcgatcctggaatgaccttcttcagaccctgtgaatgagccagacgaatgtccggcaagtctgacatgagcaaaccagtggaaggacatgatcatttcgagcgaacgtacgagcttgtcagccaggcatcggttcagggctccttcctgtgttcggcaagcttggtaatactgtcgaccatcggtgaagaggatgagcgaatgtcgcgtaaaggtgactcccgaagaacggcgacccccaacaggggtatcaaacatacctggttgttcttctccaaacactgccagtgagtctcgaattgggcattacagttttctcgaatcttggtaatactgtgtgtttggggggggggatggtaatcagctggacattcttgcaggacgcggaccttagctaggacgagcgttcccgactcacatgtctgctgcgcatcgggtaacttttctcccttcttttaggcaatgagccggatcccggttctcctgcttgcaaagcatgaagtcctctatcagagcgaggaagcggagacgaacttgttgtgagctggagaagagcgcgccaatggtctttggagtgacatcataccgttgacatccttgcagtactctccgatggcgaatgcagcactcttcaagggagcactggtcacacccaactcgtcgacatgaggtacggatgaaggaagaggattggggtcaatgtagggcctgtcctcaaagtttgccgttcggtgggaagccatcgtgaagcgtctatctcggagaggttcaaggtagatgtcaagtaggagtctggctttcaacagctgttcgagagtcttctctagcagctcagaagtcaagaccggcaacatcaactctgacatcgtcgtgattgtcacgtcgggaccagcgaatggccaatctggaatacccgacgacgaggaatccgaggtcaaacgttcgctctcctcatctggtggcttaggtaagcagcttcagagtggtcatgagatattgctcaaactgcctctctgcttctcgatcattttcgtcttactgctgcaagctgaaaacatagaaggactatgaggaggagaagatatggattcaggcgagactgcgttggattagatgtacaaagtgtaacaaagccttggctcaataacggtccgagccgttaaaaccccctcgggaaacagcttggctcttgaccgtgaactctcccttcggtaccaagtccttgctataaacgaattgacgatcagcaagaagacgtagtcggtcagggcccgaatattacgtacatagtggtgcccttcctcagcatcgtccagctgtgagacggggcagagccataaggtcagctctatcacgttcgagctggtgtgacgaccgagacttgccgtatcacaccagggtcgttcttcagactctcgttgagcgtcgccagtactggaggagaagtatcgaagagcatgctgaagtgactgtgcataaggagattggaagaaggtcagcgggtttgaaccagctcacaggcgcagacgagggtttcctatgtgatctgggcggcagtgtcgatgggctcctgaggcatccttcaaccttccaggatttgacaatcgtaactatgagcctgcttaaggttcatatggtctgatcttcggctgatcgtgcgagccaagcaagcaatctcgcgcagtatgactcgtattttcccggctcgcgccacggctcgagcttccgatctcgtgcttcccagcgcacctcaacgacactttcctctttggattcctgggtctttctaacgatgaaggctctggagactcgccaagaaatcgaaccgcacccgttcaaacgcccgaaggacactcactctccttccgtgtaatactgctgatgcctcctcatcctcatcggcaatgttcttgatccgaggtttcgaatatccctgactactccacctgttcgcatcacccgtgatgagaggttggtgatgagttgatgcaattcccgctgtccgagcgggaccgggtgtgggtcagtcaaaatgtttgctaaatattcggtcgatgggtttcgcctcggatgccttacgtttggtggggggacatgagcggcgatgcagactagttcgtatagaggcatgatgttgatctggtcggatgtcgtgcgtattgatgcttcgcaagacaatacgggacttcaaagacataggatcactcactgatcactgaacacgatctattgaacgaatcgacctcgagacggctccggtatttgacttttcacgtgacgcgattatcggtacgtgatctctcttgcccagcattcagcacttcggtgtacggcaaacccatgttcaacgggtccattcacaccctggaattgctcaacaattggcagcctggcatgaagaccattatggtcgaactccatgcaagcaacgtgctatttagcagacccactgactcgctgcagggaaagtgcgttgacaagctgcatccgcgtcctcttagcaggtgctcgcctggggggcccagatcaggcccgtctcgatgcagatgcggagacgtgatagaacgacaccgcggctcaacagtctgcccgtgaaagtaatgagacgatcgtgcgtgtcttctatggctttcgatgtatgttcattttgtatcgacatgcaacagagtcttccgatgcgtatcaatgttcgccccctgtccaagcgttctcattgcgctgtccatatgcaatctagtgcgctgcgggcttggcatccttctcagcctcggcgacgaactgtttgatgctgcaaaggggtttacgatgttgggcattagcgtctcaagctcaattactacaagcactcgaattcgaactcacaagtcctcctcctccctatttaatgatagcgtttgaagtgaaacgagcgaattcggtgtcagcaaaacgtcccggattttgttatacggaagccggtgcccatcattcccagagcatcacaggcagaaacagtgtttcggatgtcgaggtacgttccaagacctgggatgttgaccagacccaagcatctgtgtgctgttgcgtttcgcccaagagctttatcgacgcagctccttccggccacctcttggcggactgccgtggtaagaaatcccgagtgcagctcaacagacaaacccgtctgacgagccttctggtcgtaggccgagcgaggcctccttctccacaaccggtccggctgtcgctgaagacgaacacttcatcactcacttggagccagtctcgatgttcttctgctcggcaacgggggcgggggcctccttgcttccaccacccgaaaccatggcgatggcggcggtagagataattgtaccgagagcactgcagatgattgagcggtatccgtcagcatttcgcgcaacgagtttcagattgttagccgaggcgaggtggcgacatacaggtactcgttctgtaggacgacatgtcgaggatgcaaggattcagttttctaatgacggttgcccgaccgacttgcaaccgtcgctgacgcaccttgatggctcgtccagcgataacgtaagacatttttgagagtttatgggagaaataagagataaatctagtggaagaggagtgatatcttgggggccttgtttgtatgcctgataacgttggcgagttgtattcaaacgttgtgaacccattgcccatcgctgtctctccctgcctggctcggagcagggcggcgtggtcgagtctttctcggtttctcacgcgcgagacagactttaagggagcgaccgcgagaatagagaggggggtccgggggaaacatctcggtcgatcatctaacatctggctaggtagtcgagctcttgggcctactcccatcagtcactcaagctcggcatactcttacaaccgtcgtggggtacggtccggatattgcctctcgtttgatacccacggctggacagagaacgctaccgctatagtgacgacagcacgttcagctctcgcaatccaccgaccaccaacacattgcgaagtgataacgtcatacgtgtaccgcttagccatatattctccaacgacacttctcctgcacgaccttgaacttgttcccggtcgatacctaccagacaagccagtctttcaagacgacgaatttcaaaatggctggagtgatgtgtgagttacacgcccagtcgacgccgcccgcgtgatttctgtcagttcaacattcattgcttcctacagacgacctggtcatcctcttctggagggtgatcatcaacatctttttccgtgaaattcggtccgtacacttcgaacacacttttccaattcgccaggccgacgtctgacattcgttgcgatgttccacatgtagaccccgcggaacctttaacatccccagagaaggtcccgtcatctttgtcggagctccgcatcataaccaggtatgcgcctcagtccccgcttgcgacccatgtaggcggtgctcaatacaatgcttcgttttgatgcttagttcctggaccccctcctgttgtcgtcagaggtgcggagagaatgtcctcgaagagtggctttcctggccgcggccgccgtgagttcaaaaccgggcgtgacttcgaaacggtcattcgtcagagccaacgatcttgctctgatacagagtatcaagcgtctatttgtcggagctttcattcggatgctagatagcagtgagtaagccccgaatcgactcgttgtagctatggctgacccgacgtcttcccgctcagtcccggtgacccgtgctgccgacttggctaaactcggggttggcaagctgtacattgaagaagcagacccgctcaagattatcggcgtgggaactcaattcaagaagcaatgcgtcgtcaagggtcagctcgtgctgccaaagcatgtcggctatgctcaggcagaaatcgcagagatcatcagtgacaccgagattcggtgaggcacttgcactcgagtcgtcgtggaggtcgatgagctgatctcttgtcatattacagtctctcgagggagttcatcacagcgggaaggggtggagcttccgatgtacgagcgactcaaaaggtcatcaacgagtccgaagcggctagagcgcagggagaagccggtctagctttcaaggctctgccttatgtcgatcagcacgaagtatacggatacgtgtacaagcgtctgaacgagaatggtgccatcgggatcttccccgaaggcgggtctcacgatcgaccggacttgctgcccctcaaggctggagtctcggtcatggccctcggcgcaatgtcccagaacaagaatctcaacatcaaaattgtccccgtcggactgtcatactttcaccctcacaagttcaggtccagggcagtggtcgagtttggaacccctatcgaggttccacgcgagctcgttgacctgttcgacaagggtggcgctacaaagcgggagggttgtgggagacttttggagatgatccacgatggtctcaaggccgtaacgattcgaactcccgaccctgaaaccttgatggtaaagcgatgtcagcgcactcgaccgaccgacctttgctgaccgcttgatcgtgtcaatacaggtgatccatgccggtcgcagattgtacaagtctccaggacaacagtggactctcggacaggtcgtcgaattgacgaagcgattcatcgaggcgtaccaagtctatcgagacgagccccgggtcatcaggttgacggacaaggtcaggcgttataaccgaaagctgcgtgatctgggcctcaaggatcatcaagtcgagcgcgcgacgactcagaggaaatggagaaacctcttgctcctcatctaccgatccaatctgttgctagcctgggcgatcttagccttgcccggagtgattacccatgcacccatctttatcccggccaagatgtacagcaaggtcaaagctaaaggtaagatttgacttgtccccgccgcgaagtagctagcgttgtgactgattacatcgacggcgtgatcagaggcactcgccgcgtccagcgtcaagattgcggcgagggacgtcattgcgacctggaaaatcttgttctcgctcgcagccacaccatctctctacatcgtctatgccatcctcgccacctggttcgcctggcggaacggcgcctcatcgaccgtcgtcaaatcgatgcctgccttgatctttatcatcatgccgttctttgccatgtcctcgttgaagtttggagaggccggcatggacgttttcaagtacgtatggggtcgctatccgggtcggacggaatcatgctgacctaacgaatgcaccagatctctacgaccgttgttcctatccctcttgcccggaagtcaaaaggagctcgaaaagttgcgcaaaactcgtgaaagccttgcaaacgaattgtccgaggtgatcagtaagcatggccgagcaggtcaagcaggttgaatgagcacgcaagatcctgatcggtgttccaaatagacgatttcggacccaagctctgggtcaactttcatcaagtaggttgccacgctggcctcgacctgcgatgcgtgtttgaccccgaatctcttttcttttcagtcgagtctccgcccggccgcctcggtgcctcagaccggcgagaaccctggtttgatgtaccgcaagggagatggtgccgactcgtcagtgttgtcgcatcccatgttgtggctcgatgagcggatattcggtatgtcgcctacttggcccgtgatgagtgagagctgacctgagacacgagccgatgacgaacaggctggagcaggagtgcggccaaaggacccaacgtgtggaatgccaagcctaggagcgagctcggtagcccgccattgtcgccgaccgagtcggacactgaagagactggaggtgccgacgtcgattatgatgacgtccttgccatcattgacacgcggcgatcacgaagcgacgtccgagctggtggttcgtcctactcgtcgcgcaatcagcccgcctcaacggtcgaggtcaactatcaggagaatgcagacgaggatgctgtgaggcgacgcaagccaaggacgagatcggagagcctgaaccacgcggtgacggcagaagaattgagagagacgaacgctcgcgaaggggacgcgacgtttgcgtcggtatcttcggaactgaacaaggatggcaaggccgtataaaagcttgtcgcaccggtcccacgggcggaaacgatgtgaagcaggaagacgacgaaaagagattaatatcgatgacggcccttggccattcgtcgagcgaaacctattgtacatagctagaggttcttcacccctgcccccctctcacatgaccgtttatcgatttcatcaatcatcgtacatatggcccccgcggggtccgtcatcatccgccctcgctcatacggtcaacttgttcaacctcaaaaacgtctcctttctcttggccctctctgcctttttctgggtcctcttgagcgtggccggatcgatctcgaccttccagcggtcgttgacgacgtcaaacgtgcctcccgcccgtttggccatcctggcgatcctggaacgctcaaacagggcattatcgtaatcactgcgagcggcctctcggacctctttgctcgtcctcccacggaccgtcaccccgccgagtccgacccgttcgagcgtgccctggatcccagcgtcttttccgccctctcgccaagcctggacggcctttgcgccaaagacctctcgctcctccttctcggccgctcgggccaagttccaacccttggtggcctttgccctggagaatcgcggggaaagttcttcagagaggtataatggcatcatgctatcgacgtccgcggagagggaatcgaacgggacgtcggtatcggcagcggccttggcgttggcgttgatataggcgtccgagatggatcgggggagcttgttgacgggtgctcgggaggaggtggcgagcgggaccgaagtcgggtcggaccagatgtcggtggaagggacgagcgcgaccgtgcgcttggccacggtatcgctcgtcgtatccgtggcgagggctatcacgatgacaagacggatcgaatcagctcggcacgacagacgattcacgtcgtcgtcgttgtcgtcgtcgtcaaatgttgccgacccgactcacgttcgatccgctccgcctttgcgaaaggcggccaattgatcttgatcaaccccttgccctcgtcgacctcgtactgttctggatcctcggcccccttgatctgaccggccgcgtacctgtcgtatcggtacatccgcatacgtttatcccagacgggtttcgacgtggctatccggctcgcaaagacgctgcgagtcgagtcgagtcgaatcggatcgtgttcagtggggatgaaaaaagtcgtccgaggtcgtcagccctgaaatccaaactgaccccctctgcgcgcacgcctaaacccacctcttgccgcccttttccgacgcctgatcgatacacagctgaacgttggaataatggatgggccgactgacgttcataaaatttcgttgaccctcgaattcccgacgttcggtctcgcctgcacctgcggggagggcgcgcaggacttggttggccttcttggactgtgggttagtatagcaataaggggggggcatcttcaagacgtattgtgaagaggttacaacccaggacactcgctaagtagtagacgtctcaccgttcgtactgaacaagctttcgatcctagctacctatagcgacattacttccttatccgtacatcaacccggattcgtatcatcccaaccgaattcgctcccgttagccgaactcggcttccctcctgttgtgactacctacgatccgtaccgaccttgcactcagatattcattagacgcgatttagcgaagctccgccgtaacaggatccaccgttgagacccatttcccaagtgctgcgatcttagtgtcgatcactgccaattggtccggcttcatcctgtcgagatacgctaagatttcatcttgcatcaggaagggttcggccacggtttcctgagtttttttccatggcggacgtcatcacgtccatctcggcgaacttttcggctgggagagccttcaagaacggttcgaaagtgccgtccgccattgcttcttgagctcttccggcacccgtcgagccacattggccaggacttggttccggggacgaaaggtctgccgaggatcatcgacgtaagatcattgggggcagatgggatggagacaccatcctcaagcagctgatcattgtcattgcctggggatgtcccccaataaattattgggctatcatggcaaggtgtaggaggagtgggagcaaacttcaattgctcatttctgccatcaaccatgttgggccttggttcagagcgatgaccgcaattgtaaacccaccgatcgagaaggcgtctcgatagagtggtctttaccggccatatcgacaaccggccatatcgacaacaacaataaagttgatcatatcgatcatcttggcggattgatccgtgttgtcaggatcctggtcgctgctgatcgcaataccagcttgaacgatcaactttttggtcacctcggctgatccgaattgaggtttcatgcctgctgataggtaacgaggtcgcgtagacgattgagcccgaacatcgaatggttgacgtcaggacgatcaaagtacgacctggaagggtcggatagtcatgtaggcatcgagcttcccgcgattgtgggtgtcgatcgagcgtgacaccgctcgaaaccgtctttcctgattgaagaacaacaatgggatcgattgcgatcaagatgtcgcgctgcggcaatacatgatgagaaaatcgcatgatgggtggctgaaacttataaactacagcgatgcaaagtctaagcggacgcagctgcgaccttgcccttttcctctttcaacgaaacaatcttgtttaggatgagcttgtcacctgatcgcttgcccgcgggaatgttgtcgtcctcgttcaaacaacctaagacggcttctttgtcaacggcaaagtacgccaacctcatgccctggaaacggatgcattccatgccgaccagctgcgcggcggtggctaccggcgtatcgtcatcgtggggcacgtcgaccgcagtgttgttggtacccatctcgaccttgacttcggcctgagtgtcgacattaccggaggagaaagtggcagcggccttggtccgcttctcggcttcctccttggcctgcttgatgagcgatcgagacaggctgaaaaaggccggctcgatcagagcctttgtgtagaccttgagagaatcggggttgatatcatcggtgtagttttccaacttggccgggttgtcgctcttgaagagggggtcgaagaatcgaacctcgtccagctcaaccttgccctcaggggtatcgggtagccagtggacagcgatcgtgtccttggccttccacttcttgtctccgctcggcccagtaccgttctcaagtgcgcacttgataaggacgacattacccgcggcgtcggtctcatagccggtacacgtcacggggcaaggtccacccataagcatgacggccttgccaggcgaaagtcgcgagaattcggcgggaggggtgatacggaagtcgtccttgtcgataaacatgtttttgtgcatcgtcaacacggccttgcccatctccggaatcttggggtgcagcggcttttcgaccgtatgtgtccaatcgtcggcgacgttttcgatgacaagcttgatcggctcgagaaccaagaacaatctcggtacggtaagctcgagtgtctgcctgatagtcgattcgaatcgttgaagtttgatctccgagtcgctcgtcgagacacccagctcctccacgaatctgagcatggccgcgggagggattcctcgtcgtcggagagcaatcaaggtgaacagacgggggtcgtcccaacctcgtacgtaaccaccttcaaccaaggctcgaatcttcctctttgataggaatgtgccggtgagctgaagcctggcggtctcgtattgtcgtggcttgtaaacctccaaggcgtcacacaaccactcgtaggattgcctcgcttccacgaattccagagtacacaaagagtggctgcaatgagaccaaagctagtcagttatgagatcgtcttgttgtgtcagggccaactaacgtgatgttctccaaagagtcacaaagaggatgcgcaaagtcataggatgggtagatttctgcgaagaagaatggaatttgggcacattagcggtggatttcctttggatccccaacgatcttgctcactccactggtccccggtcctgtgatggggggtggtcttgacccgatagcaaactgggtcccacatgtaagggttcccgctggagagatcgatcttcatcctcaatgccgcggccttttcaggatagtgaccctccttcatccgttcaaactctcgtacgctctcctcgatcggacgatctcggtggatgcaggcagtaggggttccacgaccgtgtccctttgcagcctgcatggtctcctctaataggcagcagaggccacttgtcagcgtcgtcccatttcgtccattgctgttcactcgcgcaaactttacttactgtcacagtgacatacgtacgccttgccccgcttggtgagctccatggcgaaatcgtacagcttctggaagttgtcactcgagtaggtgatcttccacggctcgaaccctagccatcggaccatctctaagatcgagtcaaagtagactccctcctcggcgtctgggttggtatcgtcgaatctgtccggcgaaaggtgacctaccgtcagcagaccggtcatccggtatgaatcggaaaagctgctcaccggaggtaacagcatccattgtgatgcttggcgtatccgaagtcgatagtgatggccttggcgtgaccgatatgcaagtaaccgttgggctcaggagggaaacgggtcatgacccgcttgctggtagcctcgaggtgcttcctcttgttctcctcgttgatctggggattctcgcctggggcatggagtcgggaaaggaaaccttcggtgaaaagggaggtagggttcctggcttcagcggggttggatgagacctgttcgacgggagcgttggccttgggagaggcggctttggcagcgggctatgggttcaacgagatgagattcgggaatcagacaggctgaaaacggtgtatacccgaccgaaattcacataccttggccttggccgcagcattagcagcagctcgggttccaaagagcccgacgaacatgttgtcgacagccgtagcgagatcttttccgtttgcccatctatcagcagcaagtcgctctctgtcagtacccaagaaatgtttgtgacgaacatgccgcgatacttacctcaagtctggcactgcgttcttcaagccctctctgaacaccctcaagctgttccagtcggtaggagccttgctctcgccgttctcagttccgatagacaggctcgagaggtaggaggagagggagtcggcgatggattcgggagtgaaggagatacctgaaggttgattgtgcgggacgagatggatcagaacctggagctggtcaggaacgttggatgttgcagcttaccgacaccgcatgccttatcaaaggcatccttatcaatagggctggtaccttcgggtcgagtagggtgtgttgattcaaggtaggcaacggcagctatagtgtacggataccaaagcgacctcagctacagaaatggaagattgcaaaacgcatgctttgactgaccggatacctggtcggtgctcttgagcctgccatccttgatcgcctctacgatgtagacgacctcctcctttcgcaacttgtcctttccagcttcgtacccacaggtagctgctaggtctgcacagagaccagcctgcttctcgtccaacttgacatcccctcgagcgagatcagtctcgtctaccagtcgagagtaggcggaggaagactttgtcgattggacggtgttacgagctcgagattcgctcagaccggtggattgaaagagggtgatgagagctacagcttcgggcgacgtcaagtcgatggcaccttttttgggagccatggcgaatgatactgtcctgatacgagttagctcttcgtaacaagatcgtttgagagcgacgaatggtagtaacggtcgaagatcaggtctgactaatcccttttggagttcgagtgagcaagtttggcatattcgaatcagaaatcagaaatctcgcgcgaaccccatcgcgcgcttgcaggtcagacatgaagaggaatgggtgacaacgaccaaaatggcattcaatctgatacatcagggcatggtcttagagtgctgcaacttgaactcagcggttgtcatctcgatgttctaccaggaactgtaataactccagtgcgccgaagtaggatcaagccaatcatacgatgttttatccgacgaacaccatacaagcagacgtcagaacgagagatccgtcactggcacagccgtccttcctcgtctaaacttgtccaggtcgtttatgctatccctgaaagctggaagcccacgccgccgatgtcatatcctgacgcgatcacctaagtcagtagggaagaaatggcctcactcggtgggtaagccacaggtttgaccttccgcttctcctgctggatgccgttgtgccgtccgggctctcacaagttccttgaatagtagatgcatgtcaatatgatgtacaaccaagcagaaggaatcgactctctcgtcccgggtcatcgcacaagacctctctagcactgacaacccgaagcctgtggcacgtcgggctgcgcagaggtgctgacatcgatctctgttttccacaccatcgaatgtcaatttccttcctcttgaaataacaatcaaaaacgttgctgctcactcgtcgtggtcccctctcctgcaccctctgcgttggctccgggcagggccatcgcaatcttcttgaacaggttcttgacattatgcccagccttggcagacgtttccatgtacaggaccccaagttcctttgctcttgtttccagggtctctgttgtcacttgcctataaacgccaaggtcgaggtcagacttctgagttcgcgtccgtcacggaggttcaacgtacctcttgtcattgagatccgtcttgttgcccaccaatacgatgatgacgtcctgtcccctctcgttcctcacatcctcgacccacttgttggtgttctggaaagataccctgcctgttgacggtaccgacggacgcgtgacaacatgagcttcgttccggcagcacgacgtgactgtctcatccggcttactggtgatatcatacacaataacggctaccgagctatcccggatataactgggaatgagggatcggaatcgttcctatcaataagcaggaacgagtcatggtcagctccgtgccatgatccactttcacgacttctgaaaagagcttacctgactgtcatgttcgcaacgaagaacgaaaaactattggtcagctcggagagcttactcctgtatgctgtgtctcttcttgatgctcacccagctaaatgacagagtcacggtcagtctcgcaatcacccggtcgatcaccttcatgcctgttgcaactcaccagtatcccataattgcagcctcacagtccggtcatccaggtacatcgtcttgctcaaaaagtcgattccaatggtcgcctggtaggtgttgtcaaaggtgtcgtacatctagcatagccgagacaaagagacggctcagtatcggtctacggtcgcaaaggcgtgtgaggacatacgaatcgggtgatcagactggtcttgcccacgctctgctccccaagaaacacgagtttgaatttcttcatctgcatacccatcaaggttggataagcaggtcaaaggtttggataagccatgatgttgaacgagcagtctccggctttgtcttgcgagtctgtgatgcaggacctaccggattcgacgaggagaagtcctgtgatgctgcagtcgccatcttgctttcttactgaagtattccgctcggtctggttaatgatatagactgaagacgcttgacgagctgaagatcaaactgcaacaatcagatgcgaaactatcagcatcaacagttgtgactatattgttgttttaacaggttccgaacaaggctatgctcacggttcgccagagaatcgcacttcgtctgagattagtgcgtacttggaactcgtaggatctgaatgattgcagctggatagaaatagcgacttgcattgaacggaatgacggtaggtgaattgaggtatgtgttcgtattattggtgacctgacctggcttgctgctcggctgagatctcctctcgcgtgtcgaggtcggccggtcgccgagagcggaccaacttttgaacgtcaaccaggtacatgatcatctgcgtgagctagattccatgctgaaaatcctatagaatccattgacattgggattaaagctcgcagatactgcttcgcacgtagactggacctggctggagaatgaaaggagcgttgccgagggcaagatcggcatggccatcagtgtcaacgctagcagctcttgtgcttcgactcgcactgttcaatgcgacgtctctcccgaccatcctgtcccggaggatcgagctatcgacgccacttacaggaatcagataccgtgagcagtatggtgttccgtcccgttggcaacaacggtagattggaacctggtagctgatactacctcgttcacgattatgacgaattgcgaccacactagtcaacgacggcgtataccttcacaaaagcggattgaacccttatgagggcggaaactttcatcatgtaagcaccgcccagctgatttctcccaggtccatactgaagcctatccctgcatgtgtcctgatatactcagtcgccgttatatctcctattgtcctcgatttttccctttacgacttctcccattttcgcctcggccttgtttacactagtagactatctcgctgccgactcattgcgacggatatgggctgcaaggaaatggcaagaagaagccactctgaagaaggtcgatgatcatgcggatggcgcccagcgccgacgatggttgagggagaactggtcagacagcgtcatgctcttgtcagtaggcctgaacagcgctcaagcttcgactgggactgaatcgactaccttggacctgcaggtaccttctcaacccgtatactttagcaagctgtatcgcccaatcgacgacgagcatcgacaacgcattggtcctgctctcgatcgccgccgctgcgcaaggtgaatctattctatgaatgtcccctcaaatcagtcgactgatgactaacggcgatttctaaaacaggacagtctcctctgactgcattctttctctccctcgcgacccacacatcgctctatcctctactcctcctcgcgccacttctcttgctcctgaaaaaggctgatcttacaggccagacgggctcaagggatattgcgggcacgatcctgttctttgccggtttcttcctggccgagactgcgatcgcctatggactgattgggaactggagctgggtcacctggacgtggggttcgacgtgagtccgagccagtcaatttggggaccgttcatctttagcgctagaatccccctcacttcataatgttcagcttgaccgtatccgatctgactcctaatgttggcctcaactggtacttcttcacggagatgttcgaccatttccgatccttctttgtaggagctttccaggtcggtttgcacacattgagaaagagagagagagagagtagcggccagctgatcaaagggctgttacgactcacagatgcatatcgcgatctatgttgcacctttgtgtatccggttgcagtcagtactattcttgcacaaggagagcatgatggtacatagcttacacagcatctatcgttaccatagcgaccatcctctcctcgccatcaccgtgctcagtgggatcatctcgactttcaagtcgtaccctaccctgggtgacaccagcctttggctcggcctgctggcatgtcttcctgacatttggccaggtaagcctttgcagcatgccccaatgcatcctcgatatcgcgctgggtgggtcctgacacatcgttcgcttcgacgcatacggacagacttgcgacatcctctcctaagtgtggctctgcagctatactctgtaatcctccttccgatcctccattcgctatggctcgaatcggggactggaaacgccaactttttctacgccgcgaccctcgtctattgtttgggctgcggcatggccgtggtggacgtcctcggcgccggccttcgccaacaagcggcgcgaaaagtgatcgacgctggaatcttagacgtcggcgatccgaacgacaatgaagcaaaaatcagggaagcggatgaggtcgagagcgccaaggctattctggaaaagcacgatctcgtcattgtacagtatgcgggactcggatcgtgacaccatacgtattgcatcatcctgctggaaggacctggggggacgactagtgaacgaagaccgcaaacatactacccctacttcatgtatcgcgttaactcctgagctaactgaatcacgcttactgaaccgagaagatcctcccttcgtctaaaggaatatcattcgttgtttcctcggatcgtccacagcacgtcaattttggatcactgacggaagggttcggtgccactaaagtgcgaaagtaggctggctactcttgaccataggtctggggtgatgtggcgcgatcgacaacacaaaggacccggtcagtcacggcatggggttagatgatcagcacgaccgctgctcctttgttcttcgaaagttgctcccctgcatataagaccaagatctcttccatcaatcaacgggaccgcttatcgcactcatagcataagcgcaattgagcggtcctaacctctttcatcgcacaagccgaatcgactgatttcccgcaatgtcccaaagtgtaccacgcttcgtcgcgaatccttgcacgaccatcagtcatgccaaggctgaggacgggaaaaaagacaagactactgccatcatcggtacccgtcagtcgatccgcactccttaatacgtccttcctcgaatgatatgattaatattccgataaatcgcacgtacagctttgaacgtctggcgttacagcgtcaaggacggcttggatctcaccaggggtggcaaccctgctgatgcctttaccttcatgggaactgaccctgatggtaataaggtcgtgcgcgtcaagctagacaggaacaagaccgctctcgtcgtcatcgacatgcagcaagtcctcccggttgtacacatctcacggtcatgaacgaagctgactttaagcactggctctaggaatatcatgttgcacccggaagtgagagattaccctgaaggtcgagaggctgtcaaacgtttggagaaggtcattcctgcctgtcacgccgctggggttcaaggtcagtgagcgggtatgatctatatcgtgcgaatacgtgtcatgactgatctcttgcttttcattgtatttggctagtcatctacctcaattgggtcatgaccaaggcggagctcgcaaagttgcccccatctactatctttggatatggacgttctggtctgatcaaggaacccgaacaacaattcaccggccctgcctttcccctggctccagtccaacttgaagacgggacggtcatcgatgcgggcgagatgttcatgcacgggtcttggaatgcccagctctacggacctctgcaaaaactgtacgagcagggcagggatatggcggaaaacccgggtgttgccctccgttcccagtggatgaatatggggaaggagttggagaggtttttggaggctcacgggttgaccactttattgttcgccggtttaaacaccgaacaagccgtctgggccgcgagtgaaccagcttggcttcaatacgagttgttgcgctgacgttggtgcatctcgcagaccatgactgaagctcgtggcaagcactttgacacgatcttgttgtctgattgttgcgccagtcgggctcaggacgatggcaaggctcactccgtcgtcgtacgcaactgccaacagtttggcggattggtcctcatcggagacgagttgattgaggcgacgggcaaagttctcaagcataccgtctaagtcgtgcatctctcgatttgccgactgattgaacatactagtctgtgcatttacaacgaagtgtcatgatcgtgatgaatatcagccccggaaatggctttttggtccggtccgaagccccgggttgatcgaatttgcttccgcgaccccagtgacgttctcaacggcgatagccggttgatctcgatataaccctggtcggtctgtcagcacataattgacacttaacaactaactactctgtcatcatcatcgttgcgctctagaatcagaagttattcttgtcctctctgcttgactatcacaggaagatcacatatatcgaacgtaaacacccagacctgcctgccatgtccaacctcgatgtctctggctattctctgggctccctcttctccgtcgagggctccgtcgtcgtcgtcacaggcggagggacggggatcgggaagatgatcaccacggctttcgccatgaacggagccaaggtctatattacggggaggaggttggaagttttggagaagacggccgacgagatcaacgggcttgctgctggcaagggaagcgtagtcgcgtacgtcgagcccgaattgctagcttatgtcgcagagagacagaagctgatcgtatgatttacgtttctattccttaggatccaaggagacgtcagtactaaagcgaccgtcagagagttctacaagaaagtagccgagaaggaggatcaggtgagtcgacaacatgaagcctgcaagtcgattcctaccctcggcggctcatagatgttctacttgcgtcagatcgatactttgatcaactgcgcgggtatttccaagcctttccgaaagaccactagcgatcacaacagcggtaagactgcctgtctacccctatcgtcaccagacctgccgcttatccctcggctcctcgcagtgctcgatgtccaggacatgctggacagcgtcgaagagtgagtacttgcatcttttccgatgaggagatttcgaaatgaacagaccaaatctctttcccagcgaggatttttcgacttcccacgctatcaacgtcgccggcccgtacttcactaccattgcttttgcgcccctactcgccaaatccagcaacgccagcgtgatcatcatcgcttcgattgctccgtttgctcaacaaaagacggtcggggcgatcacgtactcggtcagcaaggggggcagtaagtggaacggctggctggatgtcaagcgagcaggaagataagctcaccactggtcctctgcctggatcccagcggtcactcttgcgcatcaattggcttctcgcctgatcccgtgagcgtcttgtcttcatcaggctcggattgtttcaaagacccttgactgatcggaccgtccgtcgaacgtgcaggtataaaatccgagtcaattgcatctgcccaggtctgttcccatccgagatgactggagatgggacgaccatggcgccgcatattcaacccctgttggccggtatccctaagggtcagtcacaatctgtcggaggagtcgaagctctgcgctgatagccccttgacttgtccgcaacagggcgagagggaaggggagaggagattgctggaccttgtatcatgctggcctcgcccggagggggatacatgaacaatgccgtactggtcagtccaagagattctggtcatccactttgaaattactttccgctgacgtcccattaatggctggtcgtaggtcgtcgatggcggtcgtctcatggtgagttttcggtgctcttacgcgaaacatgagcgatgatcgctaattcacactggaatcttgcccatcaaaatagactctctcttccaatgcttgatatttgcctgtatcttgaagactgtatcctgtcatgatggtcgtcgatgatttaaagagagacatgcgaggtgtattcgaccaggtcaaggtcttttacaagcgcgagagagttggtaacaagcgcggatccagcttgagcggttgctcggtcaattcgtatcaacatatctataaagctatacatgctatacgtccattccctgtataacagaccctgttgccctcgcattcactactgcatccaatttgaaaggaaccacatcacgctcgtctcgtcatagtctcttcgactgccctaagcgaagccctttttccaagctcagacagccgctacaggactgcccaggatgaacgggtcgtcgaccgtgacgtacgatctcgaagccgggatggaatggagattcgaactggaacagggagaagctatagccgttagagtgagtcgatatctcggggcgtgtctttgtcttcagggagagtcggaggtcacggttgctactgtgcagacgggtggttcttgtgtgagtcagatcaggcatggtagcccgtctgacggtcagctcacctctacccttatacttgacacgcttctttttttcacctgctcaaaacgctacggacatacccttgtacaatcttaatgtagtttgcatcgtcctcgaggcaatttgctgctccaagccgtgtgaagcttgtgggctggagttctccgctgtagccccgttcgagcgtgaagacatccgaacgagacgagctgatcagctagacgatgtgcgattgagtggaagagggatcgtcgctgaaaaggcttcgggaccgggaagacagagacccgaatcagagctgccttgatctttgcaattgtgtcccatcgagcctgacgagtctaccgcttgcatttacgtcccatcgcaattccttgccgacctgaaggtcacgtccgatgagccaatctacatcaactatcaagagataccgccaaacacttggtatcccctttacggagacctccgagcggccatctggagtccatcaccgggacagatagaaggtccgcccatccgcctcccttgtgctcgtgctacgaacgcctgacttattccctatgtgatggcacgaccgcagtctcttcggccccgtcaacggcctatacatccgtctcatcgacattccccttcatcctatccgtacacctagcactcgaacggagaagaattctggccaagcgtaatatcagcgcgaggagagcttatgcgcacgaggacgatcaggatgaaaaggtgcttcttgaccaggaacggggtccgagggtcatggtgctcggaccggcgaattcgggaaagagtacgatggtcaaagggctcttgaacttggctgtgggaagtggcatgggctggtcgcccggtgttgtcggcctcgacccggggacggtgagtgctcgccttctcaacaacgtacggctcgttgtctcctggtgctgacctgccgaccctcgtctcgaagtcgaatcacttggttccaggctcggtcacgttatcttcgcccacccaggctgtaccaacacatcatccctcccatccgctcggctcaccgcctaccacagcagcggccatgacgctcgcttcggacgttcctacgctaggttggttcgtcggtagctcagagttgaatacgagcgggatgggcaagatgtgtttcccgctctggaggaacgtcgtagacagcatggcaggcagctggagatcgagatgcgagacagatgaaatcggttaggcgagcctcccatggtattctgtgttatgaccgtactgactgtgcgagcgactcacagtaagggcttccggattgctcatcgatacgcccaccgcaatcatacagccgacattgggtactggcaagggagacaagacgagacatgggctggtattacaaatcgctgctgcgtttgaaggcaagtatgattcgacaagctcggttgacacgctgcttaccccagactcctccccgatctgcagtcgacgtggttgtggtcattggacatgagaagttgacgatcgagatgcagaaactcttgggcggctacggagtctcggtcatcagtgctcctaaatccagcggggtaagcagcctttaataaaccgttggaacgacatggcattgatttttttgctggccacaggtggtcgacctggacgatctttatcgatcacgtatccgggctcagcagatcaagacatatttctatggagaacctacactaccaccgacattggtcaacctaccgggccgcgtagcagcagtcgagacgggtctccacccgtattccttcaccattccgtgggacgaactggagatttatcgagtgggagaaggttcgtcgggcaatcgcgcattcgatcctatatcaaagctaactcgcggtcgaatcgcacgctgcaacagagtctgctgcgccatcctccgctcttccgatcgggaagcagcggattctgtctgccactagactgacacgggtgaaccctgcatcctcgccgagcatccaccggcttcagaacgcggtcctaggtctagtcatggtatcggaagaggacaaacggacagccctcccgccgagaaagatcaaagagatcaagaaggaagaggtcaaaaaggaggacgtgaagcaggaaggggatgctgcagtaacagcaaatgacggagagtcaaaggctgtagttgacgatgacgacgaggaagaggaagagccaatctggaaggaagagataggctggagagaagtctgcgggttcctgaccatgtgagtgccggcctctttggcattgatgactgcactgacaacgtatcgataccgcagaacgaaggtggacactgctaaacgtaaatttgaactcttgacgccgagtccaggcaagctaccgtctcgggtagcgatcgtcggtagcgtagagtggatcgaggtagatgactaagctagcatccatatggttccttgcattgtatcgaggcctactgaggttgccctagaaaagcacacgatgacatgcacccggacaagggatgaagtcccgccttgaatttgtgagacgcccgtgggcaatggatattatcgatcggatcggaaatgaacttgcaacaagaagaaactctacaacacatctagcctctactcttaatcgaacttgatgctgtgcgtttgcatctagtgcgagaatgtggtcaacaaagctgtcacgatatcgttcccggtcaacgagatcttggcgctgaactcacggtgatctcgcctccgacataacttcctcgcttcttcttgttcttctccttcctgaatccagcccctcgagtgacgatcaggtctcggctggccttggcaccgtagtcgttcatgctcgctccggctttggtctacggcgaaagaaagacactgcctcagtgcacgaagtcgtccacgacatgattctctcagcgactcaccctggcgtcgaacgagttgtcggcgagtccatcgtggctgaacgaaacctcgtcagccttgacccgttggaacctctggacggcttgaccctttttccccttgatcggggtggacgaggaaccgggggtgaaaggctcgatggtggtggtagtggtggtggtgacgacggcggtaccggtggcatcgagctttctcttcttggtcacgctctggacgggcgtaacggggagagcggcgacgacgaccttgccgtccgagtcgctatccgaagaggaggaagagctgctcgacgaagaagaagaggatgacgagctgcttcccgaggatgaagacgaagaggacgaggatgacgagtcggaggaagaggaagacgaagaagagctggagctggagctagaagagctagacgacacactctcgcttcgctttcgcttttgaccaatggcagcgacgacgaccggagcagccacgggagcgacctcttcttcgtttgacaggacacgagatttcagcacatttgagcgttgttgcgagtgtcagtggggcttaccatcggaactctcgtcatcgctgtcgctatcgctctcgcttgacgaagatgacgacgaggaggagctctcatcgtcactgtcgctgtcggacgagctgctgtccgacgattcggcagccacagcgggtacggcgacgatcagaccggggttaacaggcgcagcatcctcgtccgaagaagatccggaagaagaagaatcctcgtcatcgtcgtcgtcgtcggagctcgagctcgagctggagctcgagctggagctggagtcagattcggaacccgagtcggacgagctggaagagtctattgagatcccgaccgaatcataagcgacgggtggaggcacatttcccgtggagacaaagacataccggagctcgagctggaactagagctagagctagattcagcaacaacctcgaccctgagcatgtggacagtctcagtctctttgaattgcagctaggcgtacggctcggaaggcttacaggatgggcgcagccgaagcgttccacttggtcaagagcaactcggcagtgttgttgtcctccttgttcaacgaagcttccttgatgagagccttgctggtggacttgagtccctgcttgaccaggtacgacttgatcgcttcaagaaggtctgtgggtcagagtttggagagttagccatgtcgaccttgggctacgaacgagcagagggcacgacttctcacccttgttggtgtctgacattttaagttctatgagagagatatgcgtaggtcagaagatgtggttctcagcacacaaccaacctggcaaatcgaatgaatttaccttgacatctagctgcttggaggttgagaggttcccggggaggggaagggaggggtgttcagggaaatctcgggaaatcgtgatcacgtgattcttcggaatctaaacgtaaattacgagaatgataaatacttccgatcgaatcatccaatctatcgtcctcgaaagcaagtcatttctgatcaccaggtggcaaggtaggcgaggtcgaaagggggcgagcctaatttgcagcctctactgagtgcacatggaacttttgctgtcctttaatagtttattcctagatggttgtttgtacggtccatcgaatttagaccatatagcgatcgcgtaaccccacgctaaacgttcaccacatgaaccgcatccaaccctcccacccttcccacctaaacttgatcgtcagaaagacgtatagcgtcaccaagttgactatcatgttgaacgctacttcgactgatttccaccgtctttgccctaattgccgtgtcctggtagcatgcagtctgatgatgatgtaggggaccataaagtatcgaggttccaccaagggcgtcggtacgaggacggctgcggtacatgcaaagaacgctaccatccaaggtagactttgggttcgccctgatggttcgaacaagattcctggtcagcgaactcgatcgaagcggctcgacccggggcgttactcttacccagctttactgtccacagccagaggcacacgagatagcctggtgtaagagcgtatctcacagaccaatgtaggccgaatatccgcctccaaacgtagaaaaagtagtggcgattatcggccaaaaggaaagggtgaacgacgctgacagagggcgtattagctgaacatcatgacgataacaattgggaattgcaaaaacaccgagaccgactcacgttccccgtttgatgccaacgatcatcaatacgagtatcgatcccgacacaagggctcgtctattccacgtgcaaaattattgtataatccttagtcacctccacgatttttgccgaattggtgaatgatcgccgcaacttacgtcggcgtgtctatcccaaagcgcatagctcttcgcaacgctctccagatcccctcgtcacacaggaccggccagcccatcagagtcgaaaaggcgagaaagtacggaacctgagcataatgccgactagcgatgtgcatctcttggtgacccaggacgatgcctccgttccatgctacgaaaccgatgaaggccatagcgacggggatatatggactcagtgcaaaggtcagggtacgccattcccagaggacggcttgtagataggcctttaccacccgatggagggacatcacttggaccctgtcttgtgggcctgttattgcgggcgtcaaccttgccgtcacgagccattgagcctactctgccctgtcagggaaacttactctctttgataaagtagcgtagatgacgctcgtctctggcggactgcagctcgatccgcctgtcaagcaagtctaagcccgctgacatggctgtgaaaccgacccagacgatgtttgtctgacgaaaccacagggaagctagtcccgcctacgccgagtatcaagggtaacacgtgagatttcggctggaatggtccatccatcacgagcgggacggcttactatggctgaagacgtatatcttcgttcctgcccgagagcataacacagtagcacggaacacaggctcgagacgtcagtgtagtaaaggagcgaaaaaaagaagaccagaggaaacgtcgatatgacaaaggcttcttgggtcgactctcgtgcgacgtccggtcggtctcgattgaggttccggatgatcctcctgcagatcaatgggaagaagatgcagcccaacaaggcgttcagggttcggaggtttcccactgagcatgttgttcgagtaaaccaagacgctacagttgagacgatatagctgaggccgggatcagtcaagctcgtggagaagtgtttaacttgccgaggtcagtaaactcacagaccaggaggtgtcgttatgctagcatcccattctcgaaagaaacctccacaatacttttgagcctgagggatatgaaagatctcatcctagaagggcaagtcagttgaagtgatatgaagaagccggaacctcgacttacgagatatgggtccgttatttctacgttgacaaagtaagccgaggtgaagtaggccgtgacaaccgcaggtcctagaactcgcgaagacatcagtgtcctcgagactgtaacattaatgagtgactccacaagcacaagtgtctactgtgagtatatcgttgaacgaaactgctggtcgaggtgctcgtacaggtcttctacatatcttggcaaccatcagaccaggtgtactctacgtcaagaggtgacgatcaacaaagtcaacaaacccggacaagcgcgtcaagtcccagatctgatctccctccttccccccctcttcccccgcgagggatcatcgcttcggcattcggaacgttcgatgatgggacctcccgtcgtcaaggagtatcccggtccgctaccatcacaaacgatgtacatcctgcttgttgttttggcccagagcttgccctaccttgcgctcaatcttcgcgatctttgctgattgcgcacgcacgaaccgaggccaggccgagatgcgagcaggttgtggatgggtttctttctccttcaatccgtcacattattcagcttcctcgtacgtagctcggggtgatctccacattttacagcacactcgagacccgacttgcctgacgcaattaaacttgtcaccacgtcactccatccgaagcttaggtacgtctacttgtaatgtgaggtgtaaacaaggaatggccccgctgatcggacggtgcggagctgcaataatcagagtaatgtagatacagtgatagaaggtcgacggagggatgctgacgcatgtacccagtgtccagtccagacgggcgagtacaagcctggccggtcacatggtattcgcaagggaaggttcgccgaccgcgtcggacgcgatactaggcggagcaatcctcttgatgacctggttgcccatgttgtcgatattcgacttcagtatggccagacaatctttgaaacattcgtgctcgagatctgtcatcttcgccggaatgacatcctgcttgttcaggacctttctagtgtcgcggatcttcttcacaatggcagttatgcatttcacccaatagtcatcttcgaggttaatgcaccgcatagtctagatacgtgacgaaagttttggcaaaagagtcagcacacttgtcggacgtgctttttgtcaaacaattcacttgacggagattgccgccccaagcctcggttttcgttgagcaactgctgaagttccggatcgagagcttggcaggatctcgggtcccaggcttcacctgctctcccgctgctgtcgcaatctgggtatccctcgcaccgacaccgaagagtatcagcgcgccgtcctgcaacgaccgcgggggcaacttctgcatacctgatatatatgagcgtatgaagcggactcgagatcatcgatgtatctatgactagggagtttggatatcacttcgtcccgctgttcgatttcgcgttgcaaatccgcgatttgttcttcttttgccttattgtctggttgtcttttaagctggtcctcaagggtatgcaaggcgtcgagctcctcgttgtgcgccttgtatttctccaccaaatcgtggacagttgtgctcataaagtagatattcgctgatctggcatcatccagacgaagctgaatttcgtcattcgaggtcgttggcccggtcgtttcatcactctcgccattttcttcgcgtttcccggtcattgactcggcccgaacaacagggttcagaccaaaatcggcattcgtcgtgggattgttgcttggtggtgtcgtcggttcggggagcttctcgaaggcgatccacatgcgacgtttatctagttcgcgagcattgccataatcgatgaggaatccatgaacggtgccgttcgcatcttcccaaaagaggatattaccggtattgatgtctcgatagtgaatatcgctacaggctgcgagccaaagggagccaaacactcccaacaagatcctagctcgctgctgcatggtcatcggtgtcgtctcgtcgattctctcgccaggccagttgcgagtgcacattgcagatagatgtagtttcacgtgggtgacagactgatctggttcaaagccgtcttcgacgccgtactttgacggtaaagcgcggcttttcacatcgcaaccatcgagcatccccagtactgcggggcgactagcagcaacctcggaatcgactaattccaaagcttctctcaggttgttgtgggaagcggaagcgccttgatcttggtccaaagcgcaacggatcgcttcagctaagcgtgagagcacgcgcagctcatgttctatgaggtatggaggggaccagacgaacttcataataacgggttcggccggcccatccgtaccgatccggcgggccataccggtgagggcaaccgtacgtcggccccacaagtcccgtcgtctttcaagaattttccagggcgaaattactgattggagcgcatcggggcggtctggctcggcccgattgcttgaacgtagagacctttttggttgttgcgcgacgaaaacgtcattgtcgattctgtgcgcatgcgacttcggcggttgcgtcgagatgggtgcccgctttcctgtttcgcaagaagagcttgaaggtggatcatgcgacgaacccgaatcgcgagagtttgccttgaagccggcggagcctccctaagcggcctttcgggagggcatagtctggggttcgagtttgctcttgttcgaagcatcttctctcatgggtacccattcgtattcgatagaaccctgtccgtccggattctttatccgaaacctccctttgggtgggtgaaaggtgtcgatcacgttgttcaaggggcctagcagaaatgcgaccatgagaacgagatccttcgcgtgatcagggttcatcatatcgcacaggcgtgtcgtagagcaagatagactatccgacatcacgagcctcatgtactgtccacaggctgagagaccgcaggttctgcctgtgaccggattctcaaacgccaagaaagcctgcagtagcaatcggcatgattaattgggcgtctcgtctttcattcctcgcctgtgtagaaccagacttacgagatatttcaacaactggaggagagatttatccatcgtaccatcgctgacggtcctcatgtcactagaagcggatttctttacttggaccatgctcgccatccttccccagtcgactccaccgccgcagttggggtccttccacacgagtatatccggcttaacgtcattccagtctgaaaaggagcgttcgccgttccgcttcaagttgtcttcaccgtgaccgggaaggaaacggagattggggttgtgctggggagccttttgacaaccagtatagaagaatggtaactgtttctttgcccggctgtatggcttggcgcgctgacgaaggagaacatcggcgatttcattgaaagccgctgtcagggctggagttttatcgttctccgatttgcgtgactcgagctctctgaaatacttatagaagagaggcttgcgaccattttcccccttgtactagcgctacagcttcagcgataaactgctcatcatcgatgtggaattcgataaacccgggatcgaaccgacattcgaactgctgactgatccggtccgcgatatcacccgccaaagggctgcatcctctctgaatgtggagatcattcaatgaggaatcaccggtattcttcgcattgaaagacgtgtatgtgttagcgagatttggtgcggaagcggagacattggaggcacctgcaagattcgcagacggctgggacacggtctgtgcgtcggctggatatcttgcagcaagcaaagggtgctgctcaaagcgtttaggaccttgaccgaggttcttgccaagagtgtcccgcgcttcgtcctctggaaccgcttctaccattcggaatcgaatgcatctgtcgtggcgggtggaaggaatcgccgtcatggctgtgctgcaatcttgattccgctgaattgttgggcaggcagacgcgactcgattcaccccgacttactcgttcggatgaccgatccttaacaagctcgttgcacctcgcttcacggcttgaacgtgatttgggcccttccgatctagtcagcgggaagaaccggcgatgttatagtccgtcaagcgatccttccgtcgagcgtagtatcgtctacgaggggtgtcataatcatcaagttcacatggtggaagccaagagacgcgcgatcacttcttacgagtctaaagagacgtgctctgaccctgatccttcgggatcctcagactgatcacacggatcagtcggattattctgcgccgtcttgtctgtgtgtttgtgaatgggaacgcaggagacgtccagattcgacgctaagatggagacaacaacttggtgcaatgcctatcaacgccgtgcattacggaaggacccttttaacgatcttcaaaagtgttatgcagaaaaatggtcgagtgatatcactgctgatcagcccgatagtagactgtcgaaatcccctcttgattgaacaaggttttttttcggtgaaacgttacgagcgatcttgatttaccgaccgaagaagcccagcgagttccggggccctcagctagcgtgctccagaatcgcagagtctgcgttcgtgtgacgatctcagaccgctgttcagatggaactgcccggtctagcgtcttcgttgttaggacagacatgaaggcaatcgacttgcccaaacgtcaggacaggatgattaggatgagcaagaattcaatatgaacttggtagtaaataaatgaggacaaacataacaaacgagtgggacgataacatcccaaaatcgaatattcgtttttggcgaagttacagcgcgattcataagaattgacagggccgcggtcgatcctgaggggcgcgccacggatgcaaataacacctcgctcgcttcctaggccggcctctcgaaggagactcgttgattactgtaacccagtaagctcccgatgagtactccgctttagcggcaacggctgcgcgatcgtgcgtcagtggaggcgtcactacctgatgcgcaatcatatcgagctgccaggacaggcaagtagccaggagtcggaatgttgggcatttgaagcggacgggaccgaagcaggcttcaggtagttcatgtcccttcaatctttgaccggactgtgtgcttcgatgactgcgggtcgcaggtagaccctcgctttccgcgaagctaatcccatgcttattgggccttttcacgaaagagtgcgttcgaagatgaaagggcctgggagccaggcttaagtttcaaatcacccgaaccttaacgatactgaaaaatcccgattgcgcaggcgtcccagccaagacgtgcgggatgcaaaagggattatgaaagtgcgtgagcaccaaagggctaagatcctagaaattggtctcaggcattctcaatattactcagcggctataatccgtggagcaggcggctcaagatgcctcagtctgaatttcctatgctcgatggacagcttgaccagattgttattcaatcataatgacagcactaaacgaacaactctgcgtcactgtcccttgcgactgactcgttgtaatgcccgcatggatttatttcgatggacacacatatacaagtagcagaaaaacaacgccagggcatggtgtcaattcccagaaagtcgcggtccctccgttaaacactcgaccctgtctgacgtgcggttttgcatcggcggaagcatacgccaaagcccgagccaagatgtatcaaatatcaaatgtgaatacgttttacaccgctttgtacaattgtacaaggagatgagtctgtgattcgactttcatcatatcatcttagtggcccatcatcatcggcgccactcgtctctcccggtgaacgacttctcccttgtcgttgacttctggaatctcgtctcgtcgattagggggctgccaatgagacgacttccaaggcttgatcttgagggtgtataactcgtcgacctcctcgagagatagatttctcgtctctggcaacataaagaaaactgcatggaggaggatcgatcaggagttgggcaggcgcgtcagacgtagttctctagataattcgagttcccaactcactatagatcactccgtaaagcaaaacgccagcaaatacaagcaagatgagaggaccgatatcgtccgcaatcctgacactaaagaacccaagcaaaaaatctgtgcacaaggcagatatcgatcagcacgttttcgcctcctgatgcaattttgagcagagctcactccacagccaattggtagcagtagcaactgcgatacccttggacctgactcgcaacgggaaactttccgcagagatgacctggtcgcgatgcgcagggaagatcagcaacagggctagccagtgtcgtttcgatcgatggccaactcacccaaggtacgggaccccagaaagcgccaaagaaaaagatctatgccgaagtagcaagcggatcagcgcgagtacaaataaccggcatacgaaggcgacttgcttggatgatcgcaaaagcaaccaaaatctggcctccggtagtgttcctgctcgtgtactctgaagctggggtatcggcagacgccaacatagtatgtccagcagcagcggcgataacggcgcagatgatttctccgatagaaccgatgaacaacatcttcctcctgcccagccgctcaatgaaccacaaggcggggacagtagcagcgaaggtaacggctcctaaaacaaactgaattgcatacgtagaaagaccagtacccgactgggcgaagaaggtcgggctgaagcacagtagatgcttttagcagccatctgggaagataaaccccgaaataagcgttctcgcactcacccatagaagtaaaaaaaattttgaccgttgagctgctgcacgaattggatcatgcacgcatctattacccggccatttatcgatcaaaagcagtcgaccaataaagatttacgcgacgagttggttgaaacgcgcacgcatcagcttccgccgtcttccgccggttaagttacatctctggactcactcagagtacgtttccacatctgatgattggtgctcagaagttcaaaccaactggcctttcctccctgattctcgagctctagcatcgtttccaagtctgccagggtctcgtggacgagagggtcgtcgaggtcgcagttgttcattttggctatagatctctttgccttcttaggattgttgtagttgaggcagtgacggggactttcaggcagaaacatcgttccggagcaaagaacgacaccgaaaacgagctggaaaccaacgggaatcctccagcttgccgatccgttgatggtgtgagtgatccaatcaagaccgtatgcccacacaatcctgcccgttaaacccgttcgtatgagatatgctaagcccttgcgatcgactcgtccattgaacggcgctcacccgatagtgatcatgacctgatagaggacgaccaggggtccacgtagatctcgaggagcagcctccccgttgtaaaggggtacaagtgcggagagtgcaccaactccaagtccagcaatgaaccgccccgcagtgatttgggcgtaacctgtcatggaagtggtctgaacgacacatccgatagtctacggtggcgacatcgcggtttcagcttgcgcgtgcgaggcgtctcaggcctgatcctccaagcgacggggcttacaaagatcaacgaccaaaagaagatggcccccttcctaccccacttcagatcagcagtgaaactctacgaataacacagaaatcgatgtagtcataatgtcgtgtctgacccaaccattccctcactcacctgggcgatcgatccgacaaaggttcctgctcctaagagcgaagtgatgatggactgtctattggcatccagaacataggtgccatccgcttgttgttcaccgaatctctcgatgaaatcgggcatagtaaaacatgaactgatgacaccgatatcatatccgaacctagtcgacgactggcgtctcagcgaacgcgcgagagctgatgacattgactgactcacagagctcctcccagcgctgcgaaaacgcaaaatccaatgaccctcagcgatttgggtctggccataattatatgcttgcgttatgttgaagctgcccgttgcggattgcttcgagaccattcttgctcttggcgaggacataggcagatcaggcggtcttgcaagtatatatcaatatgcttacaacattcaggatttgcctggaacagactctgaaagcgtcgaagccccgggctgaaggcccgaatcatgcaatcgggcggataacgtcaacatcaaacgtccgagtatcctcctttactccgtagcggtttggtatgtcctctgtcagtgagggcgacgtactatcgctgaaaaaagggccgttagcatatgctgttcaccgagcggagcgcagtcgcgcggtcgggaagttggtcgcgtactcgtcgcgctaaacatggttgaaagaaacagctgatcggaggattttgccgggaaaatgacgtcacatctaatgtccgagcggtgtgcggttctgaacaatcggggccttcttgcatgactatgtactatatagacagatgaccaggggttgatcgaaatgcgccctggacctaaagggcacaacacccatggcctttgccgagattactttttagtatttcgaagagagacgacgttcgccaagctggcatgtctccgctcctgcgttcattcttgtcgagcatatttcaaatatactcatcctctaaggtttacatcgctacgacaggcatgggactttcgatcctctcttgcttttcattcattgccgcgggcttcatgaaaccatgtccataaccctgcgccaccgcgtaatcggttgtgcgattgttggccgcttcgggaggcacccagtactcgtccatgatggggatttggagaacgttcatctagacgacgaatgatcgtcgaagtcagtttgtcgaacggaggcgtcgcgcatattggtattgttcaacgctgggcgacattggacttcttttcgcttggggtcgaacgacgcgctggatgcgctcagactcacctttggcgtgatcaccaccatcgtattattcttgacctccatccaatctcgctgttcaaacgtgaggggttcgctcgcgatcatgatgatgtcctccctggcgcagacgagaagtggaattttcagccggccaagatggacgatcaagctaaacgatgaaaccgtgacgaacctcttgtccgccttggtcatccgataatgtcccccttccgcgtactcttcaaaggtggtccccgatgaaaagaaaagcgaagaactctcgtccgtcttgctcgacacgtatctgagaggtataaagtgtcaacctcgaggctggtatgtcagcgtgggctacaggtcgcggttctccttaccttgtggcgaccacgttctcgccgtccgatacgacaaaattcatcaagtgcgggtcgaaatgatggcccgtctccgcggccacttctttcgtcagcctgtttacggtcgcaaccgtatccaacatggcggttcgcaactccatcgtcgtgaacttgcgtgcgtgagggtcggatagctgcaacgagatgggcaagaccgtcaacagaggatcactcaccgatgtcaaccgggacttactttgctcaggaagagggcgaaagcccattcgctatctgcaatcgttgcacctacaggttagcttacgtgtggatgattgatcctgtgtctacttaccggtgtagccattcgggaacaagaagagctcgtccgtcaacatcgcttgcagtttccgtttgatcaggttgaagtcgcagatctgctttccgcttctttgttattagcgtgccgtttcgtacggcaattgaagacgtgaacatacggccccgttgtgcatccactgcaatttcgttgacgaaggagtcagtcagctatgcttcgacctccggcattagactctcaacataccatgagcttgccgaaagtccacggatgacagttatcttcgctcgctgtttccgcaaacgagacgtgttagcattggctatcccgacgcctagagaaactgtggtctcacgggctcccggcacggtactcgctcgaacatgcgcgaagaccagcgggctcctgatcttctccgccaacctgatgaggttggcattgctccaggcctacaagattacgactgagtcactcacagcggaaatctaacgaaggagtccttactcactggatgaatgctcttgaacagtccaggcctctcgctctcgatcgcagctagctcgagttttctcttgactcgatcgctacccgtgaccttttctgccccaatctgtacttcctgctgcttcgcctgggtcgtctcttcgtgggaccgctcgtacgtgtttccattgtcgttatccatctcttcgtcataatccacagtcccgtctgctccgtccttttcatccgagttctcgatagtggaattgtcgacctcggataatgactgtggaggaggctcatagtatccgattccaaatccgtctgcgttgaatggtcgggacgaggggaagcgcaactttgagtcgaaggtctggttggtgatgctgtgaataggttttgtcaccagctgtgaagggcgtgcgtgagatgatgcttaagtggggaattcaccaggtcaaactcacatcactgagcctgatgggagcgatacccttgtatacgacctgtatcaaagctatcaggattgcatatcggtcggaaagagcttgcatgtctttcttacaaatcggcacatggtgatctgcggtactgcggtgctaatcgagttgcgtgctgccgagtgccaggcttgaggagaattggtcaccgatgtatatatcgcattctgtcagcgattgtggctcctgcgaatcggtcccaggtctgactgagattaaatctcgccattgcataaaggaagtcgagctcgtcatatccttctcaggtcacgactcgcctactacttagagttgaccatcttccagttgttgactttgtcgaactttcggctcaggcggcggccagtcgggtgaataccgctatgaccctcgtatacttactgctactctacatcactggctagcctatcatctaccctctgtgagaatcctgggagattactgtctctctagtgagatccacggcaatcgacaggcatggcgtatcattcgtgcaagaagaccttgaacgtgaatcgtcagcccggatgattggcggtcccgcaaatgcgttgaaacgcaaaccgggttttaatctcatctgatcgtctgatgagactctataataccaccaacgcattatcgaacctatcgatatgcagaagtgaatgataaggtggccatctgctctcccatacgcccactgtaacaatgcaagacctccagatacgacggccgaagatgactacccgatcctcgacactctttttaaactcgctcgtcttgatcgatgaagctgatgggcgggtcatcgacatcctgacacgacaacaagatgagattggccagatagtagacaacacaactcgaagcagtacggtcgtatcatattcttcgcaccgtcctgctaactggacggcatccgatatatcgttgcggaccatcaacaacgatcgagttggagccgaaagcctgattgatggtatcccaggggaccccaaatctagccgcttcttgaactttcggcggaacgaagactttgtccggactctgatagccaggccaggtggtatcggacggcgtaggaccacgttctacaccgatgctaggacgagcgtcgcttccttcttcacggcatgtgatgaaaacggagttgacgatccggacacgaatgaggccgatatatctggggaaagacttcagtctgatcgatatactggaatcttcggtacgaatgcggaagacgacaaaaatcgaagcatggtcgagctgttctcaattcctcatcctgatgatgtacgcaccgacgaagatcccctttgtggcgattacaaggctaataatgttgacaggtcgttcccgtcacggagcctgaacaagtagcggacattgctttaacgcaggccattcccgataccacgtacctcgatcgattttgggcgagcctcttcccctctgttgacaaggcgaaacccgacggttcttggatcgtggccgtcagcctcgatatgtcaaggtggttcgtgagcaagtcagtccagctgtccctctgttggccgtacgagcaatagctgaatttagtcttgatttgtagtctgtcttccttgatgacccgtacaacctctttacttggtgcgtcgccaagccctcctgccaaggaaggcgaccatcgacacggattccctagtcaatcgccgatgcggcagccgatcgaggacgactacgattccatacctctcagtccgacgacgatggctttacgcgagttgccaacccttgctcaaagttccgacaacgacgatgaaccgatcggtagcaggctcggactttggtacatccaggatgatggtagcactcaacgcatctgggcgggaggcacaattggcgaggcagtcaggagagacggggctgagcgataacaaacgactctttgacgcggtgagaatcaaccgtgttgcagactgagccagcagtggattttgtgacatttcctatgtagactactatacaccccttgaccctcggttgatatggtatctggcaagttatcgttcgacagacgatacgtacatgtatgcctcatctatacttaatcataattccgaattgaagcattacggacaggcggtctcgacctagaaatcgtgcatctgacctcttaccgtctcgtaaacctctcaaagtttattcgtgctcttaccgacattcttaatcgaaggagtaggtcccattatagaccccggtgagggtcatcgaactttcatgctacccagctatcgtgtgtcaagattgtcgatacctgaagaactcgtggactgacttgcatgtggcgcacaaatttgggtttggcttgaagcggacacatgatcgttcccaagcaaatgcggtcaagctctcctgctgcctccattgaactattctgaaagcaagctgccaacatctttcactcgagaaagggccggcaagatgtgaaccatcgatcacctcgatccgactcttcaaaatgccatctccccgacccaacgatcgtttcaggttattcttttgtttccgctcagaggtctcatcgttcgtcgcacactattgaagaagctatatacggagatcgttctcatgatcaatgaaggtttaacttgtttcatacgataatttggccttcggacatcagattggtaagccacgccttgtggtcttgcgaagcgccaaccgcttcgttgttctctttgactatctatcacccattcggaaatcgtcgattctggccggttcctccctgaggaaatcgctatccaactctccgaggagcagggaacaggcatgtcaaggaggataaagggtgtacagctgaagaaagtgtctcttctcctgcgggcgtgaaaccatacctggtcctagctgatggttgctcgagacccttgctttaaccttgatctatctcaattactgcatcgtggcgcatcccggtttgccgtcttagtgaaatgaaacatcgtttgacgcgacaggcatgtcggatgttccacagccggcagtcttcagtaccgttgagcttggaattggatatcgaggcgaacgtcttttgatcaatatgttggtgagataggttactgatcgacgatgcaagttgctttttcagattcaacacaccggactgcattattgagctttctcacactgcgcaacctatctactgctggccaatcgatgcaacaaaactacgaggttcttgacggtgaatagttggcgacagagccgatgattccctttcgtccagcccttcgcaatcttttgatcgtcaaagaacgatccagaggctatacaagggaagctggaaagctccgaagcttccgctacggtcttgcatcttttcaagctcctgcgtagtctcgcacatcagacttgccgttcgaaagacattgtcaagcatcggaaccctcgaaaatgtcgatcaacagccgtgcactctctcgcaggtactccgactgacagcaactacactgtaccaccgcgtacgctcggcctcgaacggaacacatgcgtcagctatgatgatcgagagactatagtggcaagcggtacgtatgtagcaccacaaagcgactccacaaggctacacgaagcgcctcgtccgccgagttttgtcatatatgatacgacatggtcgatagtcttgataacatacaatatgatggtgcaattccctccccttggccgtacgactcccgccatgcatactcagagcctcgcgtacgtgacctgccaccagaatgacagtaatgcgtcagtgtaaagacatctcgtagcgatgagcggctccggacccaccttcatcttggtctcgccatcgatcttgaagttgtgcagagcatccttggccacggtcgaactggcttcgtcggcgtactcgacgaaagcaatgtctcgcttggtggggataagacggacttcgacgaggttgggatgtctagcgaggcatcgaggaaggcaagggtcagcgaggaaacgtcgaccaccgagacccgtgtgtgtcctcgtgtgtacgtactgctcgaagacgtcttgcagatcctcctttgtcgtaccctcgggcaagttttgcaggaacaagaccttgttgggaggaaggtactcgtcgggcatctggatcgttcgccgaggtacgttggcaggagccgattgacccgcgctggtgtcggctagtatgatgtgcagtgcgatatcagctcggattcagggtacagggaggtcaaagacgagcgagactgaccggcagcggccttgagtttggcctgagccttttgtcgcaaggggttcttcttcctcgagatctctgacaagagtcaagaggaaccgatcacggggcgcagcgaaggacagggcaaggaggagggagcgtgagtatactttgccttctttcacttgcgtctcggtcgtgctctgatttactcttcctagctagtcgttcagccttgtgagcctccaaggcctcgtcgccttggaacttgctaaccgcggcgtccgtgttggttttcgagaatgaaatttgctgcgaggtccccgagcgaggggaacgagatgttagcctcatcaggtcgtcgtcgacatcatgatgggaagacgcaacacgactcaccaaaggtctgccatacagggggaacccggcgacctccttcttggccttgtgtgccatctcccgatcggggaaactgatgaacgcttgccctcgcatacgtagatttcggtgggcgatgacgggagcgataggttgataggatttaaacaggttgaggagggtttctttcaggactatcagagtcaccttgtcgtcagcatgggtcatcgtgacgacgtcccggcaggtagacgaagaggatggctgtgctgacctggtattcgtacactctcgttcaagttgtggatgtagagcgtctcgaccgcgttgtctgggatcttgttgggatcttcctcgtcgtccccgttggcactaggtgcggccatctcgacatctccgttcgtcacggccggtactgatgttggtacggggagcgctgccgaaccgttgggagttacagaagccatgatggataggtttttcttgtgtgtcagtctgaaaaaggaaccgggtcgacatggtagtagttgatatgtcggatcgacctgttcatcatcatagagggtcgactaccgacccaggctcgaccgcgcggacattggcgaaatgaaaatgtccggcgcgacgcgcccgaacgaccacgacctttcgcgctgtgtttccaggaaataagttagcttaatatgcaccatattgccaaagtatcaacaactctggctagatggccgagtggttaaggcgtgtgactcaagcgaaagcttacctgataacaggtcgtattcccatggcgtaattgccgcgtcggttcgagtccggctctagtcatcactttttgctcttttcgcgctgatccagccggtcaatctcgattttcatttcggatatgcattgagccgactcttgtctatgagatggtctttttcaataatttttgccgattttttggaagtctctcgagtccttgaaagtcggtcactctaacccattacgacagagtcagcgacgatgccgacgctcggtcgtatgaaacctatcaatgtccgcccttgccgtgactgctggaaccgccggcgcttaccccagattttccccgtcttccctcgcttatcaccgcacaatatccatccgcaattgacccctatcgaccactttgtttccgcgacctactcctcgacgtttcccgctcaaacccaagggaatcgacctcgaatctctctctctctctctcgcaaaagtcatctcgacccaggggaaaataaaatatataaaccgaccccccatccacctttatctttgccgccccccctgtcaattcatctgccacctctgtcaaaccatcaaaactcgtattctaccctcgcgtcgaaacgacatctctacatttacaccactctcgtgagtagctggagcaaggcgaaatcgtcataccggacatgtccgatacgacgacctcctctcccctccattgcccagacaagctcgagctgaccgtccgtttcggtcgacatctccctcacacagtcttcccacacaaacctacaaaaaagaccctacttgtcaaaatggccaacgctcaactcgccagcttcaagatccccgtggttgacaacgagcccatggtaagtttctctttccccctcctcgacgacacctatcccgaccgtccacccgctaacgctcctttcacttcgtcctcgtcttctacagcgggcctattcggtcgagtctgacgaccgcaagaagctccaagctgccgtcgccaagatggagtctcagcttccctttgacattccttgtatcatcgacggtcaagaggtccgaaccggcgagaccctcccccaggtcctcccccacgaccacgcccgcgtcctcgccaacgcccactctgccacccccgagctcttggccaaggcgatcgagtcgagcgtcaaggctgaaaaggcatgggaggatatgccctgggctgacaaggccgccatcttcttgaaggctgccgacttgatcgccggaaagtacaggttcgagttgatggccgcgaccatgttgggacagggaaagaacgcttggcaggccgagatcgacgcggctgccgagatggccgatttcttcaggttcggtgtgagtcctcatacgagcagagtggcagctggcaacgtgatggcggcgacggtgctcatccgcgaggtcttgtttcgaaattttacaggtcaagtacgtcgaggagctcttccagatccagcctcctaggaacactcctggtacttggaagtaagtcgcaacacggcgtcgattcggccagccggtcattcatcgtacccgatctctaaccctcgtctcatcccgtcatccgctacagccgaaccgagtacaggcccctcgaaggtttcgtcctcgccgtcacccccttcaactttaccgccatcggtggaaacctcgtctttgcccccgccatcatgggcaatgtctgcatctggaagccctcgcccgccgccgtctatgccaactttttgacccacaagatcatgctcgaggctggtctccctcccagcgtcatccagttcacccctggtaacccccccgagatcgtcaagcagtgtatcgaccacagggactttgccggtctccactttaccggatccacccacatcttcaaaaagttgtggaaggacattgccatgaacttggacaactacaagggatacccccgaatcgtcggagagaccggtggaaagaacttccacttgtaccacccttcggccgacgtccgatccggtgtcctccaggccatccgagccggtttcgagtaccagggacaaaagtgttccgccctctcgaggtgttacgtgcccaagagcatgtggcccgaattcgagcgcatcttgaaggccgaggtcgccaagatcaccgtcggtcctcctaccgagtggcaacactttgtcggacccgtcatcggtcgacccgctttcgaaaagatcacgggcatgatcaccaagggtaaagaggccggcggtgagatcatcaccggaggtacttgggacgactcgaagggattctacgtccagcccaccgtcatcctcaccaaggaccccaagtcggtcaccatgaccgaggagatcttcggacccgtcatcaccgtgagtacatgcgcgtcatgtccgcacggtcgagtctcgtcccgtcgcacatcgagctgacaatgattcgtctcgaacgcgcttcagtgttacgtttacgaggacgccgagtacgagcagatctgcgagaccatcgataccaccaccgagtacgccctcaccggagccgtcttctcggccgaccgaagtcagttgctcctcgccgccaacaagctcaggaacagtgccggaaacttgtgagtctgcagcctggtcgccaggacttatcaagttgtaaacatggactgacccgtcccgtccacccacacagctacctcaacgacaagtgtaccggtgctgtcgtcggacaacagcccttcggaggagcccgtgcgtcgggtaccaacgacaagtcgggatccatgtccatcttttaccgattcgcctcggcccgatcgatcaaggagaactttggcagcgtcgaagactttgcttacccttccaacagcgtttaagagcgagcatcttctggacgtagaagcgtgtctgtggtggtccctcacgaacccttgttgtatttatcacgaacttatgagcgagttatatatttccaagtcctgatcgactgatcgctcgtgcggtagtttcgtgccacttttgaaggtcgtgacggcttggtcggaggtgcatataggagcaaaagtcgagggtgtagagtggtggtggtctgcaggctcgaacgcaatcacgtgactgggaggtttgttgacaatgtcgaggtggatcttgtcgacatacgtcagcatatctacctgctagctacatccgtcgaggtcagcatcaggtctgggtgaccataagagacctgcacatgtgtagagagaccaggaaaacggatcgatccacacccataccggtcaatctgccactctaactaagtgattcaggattttcgatcatcaccacgaaccctcaccacgaactctcccggagcccatctcatctcgccaaccatgtcaggcaacccagagaaccgcacccaagtcccccccggccctggactcgaatcgcaggacaagaactttgtttcgggcgggtctgttcccaacggtccgacctcgaaggatctggagaaccctcatccgacgacgaacctccatcagaccggggattatgctacgacgggagtagacaacccgctgaaaaagtacacagagtcagtcacacccagcgctgacatgtatagagtagtagggtcctctcattcatcaccatctgattttgataccgcacccagctcggagaagaagcaactcgagacggccgaaaaagcatcctcgctcgcttacaacgcttggaaggacgctgagcgtcaaggtcaacccaaggaaaaggtcgaccagctcaagacccaggcgatggaaaaggacgaaattttgaagggcatgcaggacctgtgtgactgaatgattagacgagctcgagcgaggttcttcagcaatttcgtgtatcatgtcgttaaatgagaaagaccaccaaactcttgtacaatattgtgttacaacacattttgccggggggaaaaacagccaaatcgttcgaccccgatcttccgctaatcatgcacaatctccagcaatttcgtcatctctggaatcgtgcgaatcttcgtgtttccctttaccattggccttgtgattctcgtgcagcttgcggtaacctttgatgtcgagcaagacatccggttcctgtgggacagggcgaatagtatcaggaaccatccgcgacggggagtatgagacgtgcaaaatgtaccatgtcatcagggaaatcgcacttcttgtaaaccgaaaacagaccggtcgattctaaaagcagcatctcgagtaaggtcgattggcttgagagggatgcgatgacatgccgctcgatttgatctcaccgataatgacacactcgacttccttgatgttccagatctgatacttgcgcagagccgagttcaagtcggtcctggagatgcgatgttgcctcatgaccttgtccaatgatttcccacgaaaggcaatgaccagaggtggcgactggatgaggcgttcgaaatggtcacccatgttactggaacacagagagctgtgcaagagggacaggttctcagtctgaaccctccgtgctcaacaaggtcggccgagtgtttacgcacgtgatgagctggaagaacagcaagaccgccagagacaagattcctcttgtgagagatgtccctatcaaggctacggtatcagcaacaacccacaggagatgggcgagcacgaccccttctcacctgtcactatcgcccctaatacacttcccaaagcgaccccgacgatggtatcgaacagcgtgaccggagctgaacaccgattgctcatgaaccggaaatatacaaacaggaacatgatcgcgatcgacccggccgctgtttcatggcagaacgtccaaggagacccgacggtcagtctagggatacctatcgtcccgaccgctgtcaacgaggatactcaccgaccggatgaaggatggacgcttcacggtagaaatctgattcttggatgaccttgattccgaggcccgaggacccggtgtcgtcttgggcgctcatgttgctgatgtatagacaattctaaatatcagcagactctacgagatgctggctagtccaatgagctagagggcagggttgtttggatttgggcgagaaacgttggattgcctttcgtcgagattcttggcgaggccgtgaacgcggatcggccacgcagcaatcagggtctatccatatagagtcacttgcggcattcctacacagcgcacagatgtgtgtagctagttacagcaagcccgaccttgcagctgcagctgtatttgcgctctgcatctgttcctgtgtagttggccgagggtcatcattgaccgtggtttgcgctggtcgtcccctgtgattccggaatccccgcctgagcctgagggtcatcagatcccgccgttctacgcaagaaggtcactgctactatgctggcgggatctaacattcccggttgtgacgacgctctcggcatgcttcgtcgcacatagagacggctacttgcgacatgttgcatgtaacatggagcttcagcgcatcggcgagctacgagttgccggtcgttcgctagctccagctctggcattaaatgatgagacatttatttgaccgatatccccgccaacgactggcccattcgcaaagtcaccagcgaaagagggcgcgagaagggggaggaaccgtgacgtcacgcatggaagggttcagactcggatgtcacctgacccacgtcgcacaggtctaccgatcgagtgacgagagctatggagcaggaactgtggaacatatgatttgctccagctcggagttcgggctgcaaagctgcaccctgttcgcaatatcttgatagcatattatcggatcattggccattagttggagctcttcggtatctcatctcacgggttcgaacctcgagcgctgtatctaacatatgaatccaagcacaggatggtgcctttggctgaggctgaaatccatcgcacacattatcatgtgcttgtaacaggatgctccgcgctcgacgctggcacgctggtttcccgtatcctggagttgcgggttggagccatatacttggtccagctttttacaagggcaggttcttggcagggattgccgcggccgggtgggattgcattcagcactaccgcttgcaagatcgggctcgcagatcgaaaggttcccaccggatcgaccctggagcattggagcagataccagagtacccagagtaggatgaaacgatcacacgctcttgagttcaaaggtatcgttgacctccagtcgtcagtacgcgcccgccagtctttacgctagctgggcttagatgcttttgagccgagcttgatgacgaggggggaaggcgcaaggggagccgaggttttttttaccggaagaagatcctcgtggatttgacggggttcgagggaatgaccccgagaaagtcacgtcccctgcccttcccgcctagatccacctggcccgctcgcgtggtggagcgaagccgagagacgggagtgagcgagatctttgatcaaaggcaaaacaaagttgtctcctccctgatctgcctgagcggtcaccctcggacgcttctttcatttgggaaaccatcccccctcctcctccagtgcccccttctgctgcactgctgctgatgctgtggccgccgtgaactcgcttgaattactccattaatcctttcatcatgatcagctcagagcgagagggatgccaggaggtgggccgagatggcacaatcatcgggatccggttgatcgagagaaaaaggatggatatgcccaagctcgccgatatcttgcctcttgtcaaccaacctcgtatcatcctgtattctagcccaagggaacctgtcgacctgagccaagcggaccgaccggatgactcatatagtcgttaagtagctacaagtagacataaacaaccagacgatccgaaggacggactatatagccatagcgttatagccacatctacaagcctgcagcttctaaggactccagaccattatcgacgatcgcaatagcaggtcctttgaagatgttgagatcaacaggcacatcagctatctccgcgctactgtttctcctccatgtctcccagctcgtcgacccggtacaatcccagacgaccacctcgaatggctgtctccgtctatctggatcgaccgcatgcccaggcttctccaccgcttgggtgcacccccaaaacctctcgaacgctttccccttctttgccgaggtcgactcggtagcgtcctttgacgctggggtctttcgatatctcagcgatcccgaccaatatcgacagaccaagtttgtcaatcaactgggatgcacgaacagtagtctcacggtgctgaggtattcaaggacgatgttgtgttcgtcctgggtcaactcgaggtggtccgtcgagtgctttgatctttacggtgagtacaccgatcgacatgaaagctcgtccgcagatacgatggctcatccgacatgccgtttcgatgatagacgacaccaacgccgcaaccggacccaagatgatctgccaagattcatgcttcgccatgtccgatgatgaacagcggatcgtgaataacgagcaatgtcagtcgtacggtctgtattcaccctgactctcagctgatcttctaccaacctgcgacgttgatgcacagactgcccagggcctgatttgactggaggtgcacgggacaggaatatcaccaaagactttgtacagtgtacgaattggtcggtaagtctaacgagttaggctttgcactactgcgaggacctgtctcttagacccgttctccgttcatagaccttggctacgaataacacggccacctgtgtccccggggatctcaacgaggggaactgtggttacggaccatccacagcccagctgtgcgctttctgcaactcgacagcaccagacaattgctgctactcgggtgagttgggtcgatcatcgtccgaccttcacgtcttgggaaactaatcaggtctgatgcccatttgcaggtaacacggactttaccgactgcgcgtattcgttggcggatctccctccgcaaaccaactccagtcagggcaatcaaggggattctgacagtggggctggtggaggcctgagcgggggacagattgccggaatcgttgttggaagtgtccttggcggtttgctggtgagttcgcgatcgtctccgattgacacaggcacatggcgctgaagccggactcggtcgtttgttagcttctgggacttttggcatggctactcatgttctgcggtgttctgccgatttgcgggtacggtcgacgtcgtcatcaagaggcacgctccaacaagcgtagctctgcatctaccgaagctcatcccacttcggaattcaacaacgctgccctgctcgacaattccgccggtccttcgcctaatggcagcgtaatcactcctcacatgactcagttgggaaggtccggaaccggggcaatgagctcaaggacgatgttcgggggcggatcgatcttgtcagcgggtgacaaaggaggagcggcggcgatgggtgccgccgcaccgatcgctctggccaaaccgttggccacgggcgcggcaccagacaggcagagggcgctcttgagcagcgtccgcgacgagaatcagagtggagagcacttgatcctaccaaactcgacggtgaccgtcttatggccgtgagtagcaatcgttctcgaatgcaacgacgatctgctgaacagcacctctcttgcagatacacggccgctcttccggacgagttgtccttacagccaggcatgaagttggtagtcctccgtatatacgacgacgcatggtgagtgctcgaaagcagcatgactcttgtggcagaagctgagtttgggtcgaacacaggggtactggccagatcgtatcaggaaacgaaggcgagacagggaaacagggagcgttccctctcgtttgcgtaacggagaacaataccgcctccgagtactctgcttcagctggagtcgcagctaccgagagcgtgagcggtcggtcgagagtttgatcggttcgagacggcgtgtctctcaagagtttataatggagaggtctctccgaccttcacaatgtacaaaaagaggccccaacagcctgactatatctgtaaaaaagcgaccgcgacgatgtgagaagatgcaatacccctttcggaacgtatattcattatgcctgcgcgctccgaaaccgatcgaacgatgacgctagcttgaggctcgccagggtcgtccaagactactactgtctttgcagcagtgaaagagcaggacctcacctctggtacgaggccacagctacccgcaggtgctagccctagatccaaggcttattccatattagtattatcccaggcccgcacacaatcggcctcggtattctcagcgatcgactttgtgaccacgtcgttaccggtcggacatcgccggaggcgaccttcttgccttccgactggcgatcaacctgcaacggacaccgagtctgtcatcgttcacggcacagcactataatcaacgatggagagttggaagaatagtaccatgcctcgccgcgaagctgggacctgctcaatgcgcggtagttgtggcaagaaaggcatcttcggacaagctcttccatgtcctgacaatgagaaagctgatcctgtaggtgtcgttccccgagcctcagaaagcttgagctgacaccaaaccatcgaacaacataggcagatgatgatctgaaacaagcgctgcgggaagtctgcgggcctgcctggaacattcctgacacggtgtgctgcaccgctgatcaggtcgagacgcttcgatcctccctgcaacaagccgagcccatcctctcatcgtgcccagcatgccggaacaactttcggtcatatcactgcacctttacctgctcgcccgatcaatcactctttctggatatcgtctcgacgcaaaagacggattccggatacgaggccgtgaaggaggtggactactacgttagcgaacaggtaaagaacgggttctttgacagctgcaaaagcgtccagttcggagctaccaatggattcgccatggatttaatcggcggaggagcgaaaaccccagacgcctttctacaatatatgggagcctatcgaccaggcctggggtcgcctttccaaatcagcatcccgaagacctcgcccagctcggaacgggaccctcccagtgacatctcgcctttgacatatcgccccttgaactgctccgacaacggacttgattctcgatgtacctgcgtcgactgccccgaggtctgcgccagtctgccctatgtgaatccccctcggccacccaacgatccccgttgcacagtcggatccgtatcatgcttgacattcagcatgttgatcatctacgccgtgcttatcttattcggactgtcagcctattcatggaagctatctcttcgacatcgacagaagcgctacgaaagggtcgccatgaccgatccgcctctcacctcgcctacccaggctagcggagccaacccattctctcatcacgtgtcatcagctcgggacgagtactctggcgatctcggtgcacttgaccaagatgacaggcagcatactcctgggaacggcgaagtccagtcaacggccccgagcggatcgagtcgatttcgattggggcgaggggccagcttgctcgatcccatcgaccagttgcagcccagaaggagcaagatcaatttggtgctgagaggattcttctaccgtcttggctgggcatgtgccgcatcccctgccttgacattcggtgtggccgctctgtgcatcgccattttgaacatcggatggaagtactttcaggttgagacgaatcccgtacgactatgggtatcgcccaacagcgaggcagcgagtcagaaggcatactttgacgagcactttgggccattctatcgtgccgagcaaattttcgtcatgggtttacctccgaaatccagcttggacactgtcgaaacctcaaatagcttgccgcctgcgaccaacgtcctgtcctacgataccctcgactggtggctctcccatgaagcagccattgccgaactcaaatctgagcccaatgggtacactctccaggacgtctgctttgcacctgcggggcctggatcaccttgcgtggtacagtcagtatccgcttggctaggcacagacatgggacaatgggaggccgaaggggagtacggttggggcactcgtctccgggactgcgcggcttcacctgccgagtgtctgccggactttggtcaacctatcgacccgaaacttgtgctcggaggcgctcagggtgaatggatggacgccaagagccttgtcatcacctatgttgtggccaattctctagacaaggacaaggtcgagaaagctgcggagtgggagcggactttgcaacagtacttggcgaatctccaggcgacctctcgagagcaggcgaatgtacaaattgcttactcgaccgaggtcagcctcgaagcagagctcaacaaggtgaatgaatcgggatcctccaatgaaaagcgatgctgatcgttgcaatataatcatgcagagcaccaatacagatgtccgcatcgttgtagcgagctatctcgtcatgttcctctacgtttcgctgacacttggaggaggtgttagtccggatctattcctaggggagcacggatttttcgctggcctacgggacacaattgcggacgcaatggtggccctgaagttgagaaaagccccaggggaacaacatgcttccggtcgcacggtgactccacctcccaagcgtcaatacatggcttcgctactctcgaccctgctgagcgtcaagtccaagtcgttgttaggacttttcggaatctgcatcgtgctggtagctgtttcgtcatcggtcggcttgttctcctggatgggtgtgagagtcactctcattatcgcggaggtcatccctttcctcgttttggctgtcggagtcgacaacgttttcatcctcgttcacgaactggaccgacaaaacagcattcacggaccgggctccaagactgctcgcggtcctagcggggcctacactgaatccttagatggtgagatggaagcaccgactcacctgcctgcagaggagagagtcgcgaggacgcttgcccggatgggaccttccatcctactaagctcgacgaccgagatcgtagcattcggtctcggtgctctcgtgcccatgccggcagtccgcaactttgcgctttatgctgctggaagcgtcctactaggtgcccttctgcaagtgacagtgttcatcagtgccatgacactagatctcaggcgagccgaggtaagcagcaggggattggtgatgacatgctagcaaaactgatgtagatgctcgtacagagcttccgcatggactgtttgccgtgcattcgccttcggccacctgttggcctctacgacgtggactcagatgctgtcaataacaatggagaatccatgatgacgcgcttcatgcgtcgggtttacgctcctttcctcttgaagcgggaggtaaaacagatcgtgatcgctgcctttggaggactcttcatcgttgcggtcgtagggatacaacgcatcaccatgggtctcggtgagtccttccgatacagtttgtattcggggaggcacgcatactgacttgaagaagcacgttcagaccaacgtctcgctcttccgtccgactcctacctcgtgggttactttgacgctctggacgcgtacctcgatgtcggcccccccgtttatttcgtgacgaaggatgtggacgtcacgtctcgagatggtcagcaacaactttgcggccggttcacgacttgcatggatctctccgtcgccaattcgctcgaggcagagcgtaagcgtcccgagagctctttcattgcgaaccctccagctccgtggatcgacgacttcctacactggaccgatccggcgctggatacttgctgtcgggttcggatcgctgacccggacgtcttttgcaacgcgcgtgattccgaacgcctgtgcaaaccatgctttgctgatcgagagcccgaatgggacattacgatgcaaggccttcctgaaggtccggaagtcatgaaatacattcaacagtggctcgctacgcccacggatgaccaatgcccgctcggaggtcaggcgccgtatagctcggcagtctcactcgcctcggataactcgtccatgatcgcgtctcacttcaggacgttccacgcacctctgaaaacgcaggacgactttatcaacgcactcgcagctgcgaagcgagtcgccagtgacattcaagccaggacaggagtcgagacttatccatattcgctcttctacgtcttctttgagcaggtgggttggtcaagactttgagttctgagttcaagctgactctgtcgatttccatcatagtatgcctacatcacatcgatgacgatcgaggttttgtttctggccctcggggcagtcatggccattacgacgattctgcttggaagctggagaaccggagcgacggttacggtcgtctgcttgtcggccgttctcaacgtcatgggcgtcatgggatactggtcgatcagtctgaacgccatctcgctcgtcaacctcgtcatctcgctcggaatcgcggtcgagttctgctcacatattgctagagcattcatgggagccggacagggtctcccttacgaccatccttcgggtgggaaggagcgggacgagagagcgcaggcggctttggtggatgtcggacctgctgtgagtgatggtttctcccaggtattagtttgagcaacaggctgatgtgagacgtcgggtgggcgatgtaggtgttctcggggatcaccatgaccaagctcattgggatatcggtactagctttgacgcggtcaaaactcctcgaggtcagttgcttgggccagcatatgtcacttgctcgcgaatgctgatctgggtcatcccgtcgagtctaggtctactacttccgcatgtggctcgcattgatcatctcgggtgctcttcacggtctcatccttctccccgtcgccttgtcatatacaggtggacctgggtacgcgttggaagacagcgacgaggattgggtgacttcggccatgaggcgaccgttggattacgagtactcgcctttccacgatgccgacagcatcatgtccgattagaaatcagtcgggtttgttcctgtgtaccatgcatagcatatagcttctcatacctatgtgacctgagggggtatatcacacgaataggcatatatcattttgaatgagcctgtcgcatcgttgcccacccttcggcgcggaagcaaatccttggctagattcgcccaagtcccctcccttggcccctcctcctcctctagagatatcgggggatagcgaataaccatttcgacgtcttccccccttttacaatgaccggactaaagatcgtccacatcgctacgaatcaaagcacctgtcaacgtcgagatcatggcggaagaaggcggtccttcacccgtgcctagagcgtcgccggtcaacgagataaccgtcgctaggatccgtcaagctcgcgatacgctcgtggccgaatacacgaccgttctagaccgtgtcctactccacctcgaaagcaagctcgcagcctccagcgatgcggcatccggacacgccggccagagttcctcggaccccttgacgagtcacgagaaggacgttctcgaaatctgtcgatcgagcgagagcgtcctagccgcggaatcgctctctggtcagctcaaatccagaaggctagagaagaccaaattgacccgcgatcagagcatactatggcaaaagatgatttcggaacgaccgtatctggccgaccccgaagacgaggtgaacggagaaggacaagaggtcgaggacgaagagtatcgtgcgtagccatcctggtacaggtgatcttcctgggacggcattcgctgaccaagactgtcgaatacctatcgtctcgcaggcgtcgaaagagatccgtctccgttaccaaacgtcgagcccaccctgaacagcatctctatgagcaccgatttcaacccttcgactccgaatgtacaggaaccactcaacccttcgacgtcacgcaaacgctcacttagcctgagcaagaccgatttgcgtgacctcgttcccaaacgtgccaaagctgagcctcgtcctcgattcaagcacatcaccaatgccctgagggaagagatcgtccgcgaccacatcacgtcgagtcgtggtcaggctgccactgtctcgctctggaaagaacggtacccggatttgacgatcactcaatcgagcctgtcccgctggatcaagaatgccgaaaacatccagctcgccaacgctcccaacgggtatgcgtccaaccgttcccatacgaaacatcgcgtcaattatcctcaaatcgatgaggatacagggaacgcgttgttggaccttcaagagcagggagaggagatcacgagcgagatgatcaagcaaaagttttccgacatttgcgacgagcgcgaggtagcgctcgaaaaccggcccaagttcagttctggttggatggagagcttcaggaggagacatcacttgcccgcccccatctcgagctcgagcgggaggaggagaaagtcgggccgtcgtggcggtgcagctgggaacgatcagggcgatgccgtcgacgtcgacgtcgacgtcgacgtgcaggagggacaagatcatctcgcaaacccagagatggaaacggatcatccaggtgatacctacctttcgaacgtggacggcacgctcgcacaggatagtcatcaggatctcgggtttatggctgtcacggccgccgtcgatgcagtcactatgcacgacgacggggctcggaccgaacgactcgctgaactcgctcaagggcactttcagtcggtcagggagcagagcattcaggatgacaggcagcatcatcgtcggatggacggcccaagtcgtctggaccacgaccttccctacggagccgaactcgttcacacgacaatcggggatcatgccgatgtctcggcgcatgtggacgaggcttccgaagctcaacaactcattcgagaggtgtttgagagggaagaggcggaacgtcgtggtcaagaacagcagaccgaggtcgaggtcgacgaggggtacaacgtggaccccacgttgacaggtacggatctcgcatagcctgatcagcctggtcgtcttgaaagagtttgtctttgtgcggttcttctatacgttgatgtgatccgtttgtacattttgtgactttccccttgaccttttgtatggaaacgaagccataatgcctgagacaacgccgtctgccccgctggaatggtggtagtctaatagatccacatagatccttttacgacacgatgcacgatgtcgttgtcccaagcctgcagcagaggagtgatgtaggcgcggacggtatggaggattgacgtcggatgactgcggaatgaatcacgatgaacaacaacaacacaccactactctgctgctggaatttcgcgggatatgaaaccgacaccgagcacagcgcgagagagagagacacacacacacaagaaagtgactgaccgaccttttcggtaacaaattccacattcttctctcgactctgatgatatatggggggttcaaacaaccctgtctggaatggtttgacactcgccatgactcacagtgatcagtgaacagccttagaacaacttcgctaccaaacccccttcgaaacaacgtaccactggctaagcagacacgacctagagcttgatcttttcagctcgagcggagaccgacctcggccctaccccgcctttcgggggtaaaatacctttaaagtcgagatggcgactttagatcagaatgcaccggtcgattaccgggaagacgacatgctgcaagatctgtcgactcctcctgggatccgtagagcgctatcggatttttctgttgtccaaaacaccgcgatgccagccggcgacgggcctctgcctgaacatggtcatcacgtagcacagcaggatcagctggacgattcgactttgacgcccgaacaccttcagcctcgtcttctcggtatcaagaaccccaagctcgccgggctcgcctctggagtatcgccttacactccggtcgacctgaacgtgtatcttcgagctgatcatgcgacaccgacgccaaaccgtacctcgccctctcatcatctgctaccccctctctcagcgagtagcagccgaagtcattctccagctacgagcaaccaatcgctgtcgcctctgccgacactctcagagctgcgtaatctacagcgggcgaattcggcggcggggaggttgatggccatgaaaaagttgatgggccagacgccgccgtcacctacgagcctgcgtcgagccgggtctctaaacgtcggagcacagagtcagatgatgctccgacggcgtggatctggaggaaaccagaacggggacgaggacgatgatgatgaagacgaggatgggcagggaggagataccgtcgaacaggtcgacagtgatgatgacgggactgagcggaatgccaaagatgatgaacagctagcacacgagctcaattcctttggtgccggaatgctggggtcgcccacgaagcaaacgggagcgaggaggaatccgaatcggagccgaagactcggctctatcgatcttttacgaaatcatcgtaccgaacagtaccctttagctcctgaagatcaacccgacctagacatcgctctcggctcttcactcggttctgcacgtgaagttgctggcccgtcagcgttccccagacctcgattaggacgctcgaacacggtcgggacgggtggaggggaagagaggaggagcgtgatcggaaggaggatgatggagagattgggcagccgaacgcgggtcgccgagggggatgccacttcttcgccgggaccggcaggattgcaggctttgatgcagcgagccaaggagaggcgggagaacgaagctaggactaggcaagcggagatcgacgctcaacagctcgaggtccaagaagctgtaccggcatacgaggaggacagtatggcggcggagtctcatagaaacgatccttctgggtctcctcccagcttatcgccaattccactgacgcacagctatgatcgggaggaaggtgacgagagcggatccgaagctgtagaaccgttcagccaagcgtccgctggcccgccaatcgtgctgtcagacccggttgcgccatcatcacctcctcgagcaaaacctcacaacgtgcttgtgcgtgattcatcagaagatgcaggacgtagtagcttcgacgctgccgtctcgagtgaatccgatcatcaacatcgcgggtccgtcatgttcgccgagacgtctgggagcgaggattcgcatcagcgttatcgtcaacattcgccgtatttcggtctcggtcatccgggattctctggagcccaagggcagagcctctttgctgggtccagcgatctcgcccggtcagtctcgcaagcgaccgctaggtctggcatgtccgacaagttcgaatacgaagcgcatttgaggcgttctggatcggaaaagaggactaccagggcaagtatggtgacgccgacaccgggcgacgttgtcggtaatgtgaccatggaagaaattttggacgcagatgattcggcactgagggaagataccatcgaagaaatacagtcaccgatcgacgatcgtgatcgtgacggtgacttgcccccgaacatgcccaataaccacaaatctcaagaagaggaatacaggcccctttctgcacacgctgctcacgaatttgcagacggccctgaagatttgcttccaccattggcgccgtttgtcaatgagaacggaactcctctgcgcgattcgactgccaatcagtcggggggaaagcacagtaccacaccgtcagaaagctcactcggatccagtctcagcgcgattcccttcatcgtcagtactggggccgagggcagccccgagactcgcgcccctaggatgcccattccgaggcgggatatgagcatgtccagcttccctgctgaagttcaagatggagatcggagggtcagcgatttcggcacacctgggcgtcattacggtagctcggccaattccccttcgggtacgctcactgcctcgaaagacagtccaggtagctcctctatcggtctcgtcactcccaggatcctggacagccagccgagtcccgaaaacttcaacgacaggacacatcgtcgtttggggtctgccttcgaagaacgacagaacgattatcgagaccacgaaatcgaggaactggacgacaccgccagtccggccaagtatagcatcatgtcgtgagtcatctatatacccgtagctgtagttggctggattatgctgactagccgatcgctgccaaagatggcacgacgtcgatgttcctgcagactctcccataccgagcgaacaatacaccaagcgtagtcagggcgtagttcaagcgctgaaaagcacgttcatgcgcaacaggagccgaagtaatagccgtactgccatggatcaagccttgacaccgaccgtcacacctgggacgcctacacgaacttctcatggtagtttggcgtccgtacaggccaaagaagccctcaatactcctccacaccgcgagagtcgccgaggaagtcaaaggtcggatgctagcagtatgatcactggacctcacgcgtcgatgcagtcgagcgtcttctctactgccccatccgtcgttttacctgccggtcaagtctcgcctttgcctcagatcgatcccaacgatccacgtgcgctcaattcgaagctgtcacccttcgtgccgcagtcgatgcatgcaccgctccttcagcaagcatcggactctgtagtaccgaccatgacgagcagtaaaggctctcctcctttatctcacgcatcaagcaggacttcgcattcgcagctggacacttcgccatcttccgctcaggcttcttactacgatctgaccgctgcgaaagagctcacgccacatgacgaaaagagcattggcaaaaaatcttggttggccgacacgttctttccacctcacggggctacgactaagcgccgaccctcgatatctaatctgctcaggcgcaaaggcagcatgtcgcaaaactcgtcgaggaaaaatagcgtgacgcaagacgctgtggagaccgttttaccggcttcgaccccaccaacggctgcgcgcgtaccgcctcccctggaggccgccgacccatcgctcgcctcacctctgagtttcccagtcatgtcgcagtcgccaggtgccatcgagcgtatggtcgcgatctcgcctcctctcaagctatcagcggcaccgtcgacgctctcagccgtggaagaacgagtggcaccgatctcccccaccccccagggctatatcagagggccagcaaaggaaagcaatcgtgcttcgaaccatgagctcgcacatgcagatcgagccgcccgtaccgagtctctcctctctcgccttgactctctcctatcgagtgatccaaagcatcgcctcgcagtattcgatgacccgcctcgaagactcgttgcatcggctgaggctctccaggtcgtcaataatcatgtgagtcacctagcttttgcctcagggcgttcataacggctaaaccacatctatcagaccatcctggaccggcatttgttccttttcagcgatatcttggtcgtagctgaaccaatacctacgaatgatcttgaagccagagcaacggccactttcgcgatcaaatcgatcgtgccgctgcagacctcggtgtcacggcatgtacaaaggaagaccacgtcacgcatactgagctctggttccgacattgcggagtttagggctcatttcgcatattctccagatcgcgcagtcgaccgtttatcagaacagacaagaatcgcgcaagactcttccgctttggcggagatcctgtttgatagtcacgattttgacaaaagccaactagcggactatctcgtccagccgcggaatcgaactctgctcgacgaatttatccgtcaattaaactttggaggcatacggatcgatcgcgctctcagggtctacatcatggctttgcgcctcccatcagataatgttggctttgagagcatcttgcaagcgttcgccaagggctggtatcaggccaacatttcgaccatcaaatacggcctgaacacggttcgcaacctggtgctgctgatcatgaagctgcatgacgggtatcaccaggagtccacctttggattcgccagagcagagtctgtcgtgacctgtggagatttcatcgcgggtttctacaagcaagacgggcaaagggttgtcgaagaaggcctgctgaagacgctgtacgatgccgtacgtaacgagaagtacgtacaagcgggatccgcggaggaaatccgtcaacgcggccgcagggcagagatcactcctagttccgaagagacatggctcgcagctggcgagtggagcgagccctttgtcgtgactattccctcgacagactctggcctcaccatcaggctgttgggtgaaggattggcattcgatcgagacgtcttggaattcggctcgttccgacgacagtcgttccgcgtcaaaggctcggttccgggccggttcaaactactgttgtctcgatcaggcgagaacgcgtaagtttgagactggcgagtgcaccatcgaccttttttttaactgaaatcaaatcatcgttccagagcattgtaccccagcctgccaaacggaatcaccatagcgttggaacctttattccgctttcatagtttcgacctctccttcctcaactcccttgggcaccggcgtcgctgccgattctctctccctgacaaggcgtccgttaccgactttgtcaaggcgatcgaagcgcaaacagtcgagacgaaaactatcaagggtcggggtgcagtaggctgggctcagcagagtcttcctcattgcggcactctccctccgacgtttcttcaagcggcggatcgcatgagcctgagggccctttcggacgctctgctgtattcattaccccatgcatccgaagccgagatcgagaacgacctggaggccacaccgaaagctcacaagccgctcggcagctggacgatatcatcagcccaggaaacctacaatgcagcagaggccgagcggttcggtcgtccaatcaatcaggtgcacggcactcccaccaagaaatccagatccgacaaagggcagacgagaggcacaaaggcctctgtcacccatccgttgactggcactgaagtcgaattggtatgccgacagaacagcctcataccagtcatactgggccttttagagatagagaggatggtatcgaacggaatccctcaaacgaatcacgagcataaagccgtcgggtcataagaccactccgatgggcatttagcagctacgacgtaacgagaactttgacacgacaatggacgacgaattcacatcgatgcgattgatattttttgtgaagcgaatcgaatttcatgtaaaggatgtaagataccccgacacttatccggagccatgtcagtgaagcgctatacgagtacagggcgacgacaacatctatcgagagcgatcatatatcgcactagcgttagagaacaaagggtgagccgacgagtccgttacttctgaccgatccggtcgagcgctgcgttggtccgcttccaaaagggtaatttcggcggcggggcggcaagggcggcttctctctcccttgctcgagcttgttgcgccatctcgatgtacatgtcgtcttcctttttctgatctgcgagctgcttgcgagactcaacaggattggcgaatgtcctctggtacttttcctctgcctcgatcttggcctcttcttcccagatctctgcgagttttctggtggccttggcctgcttcttcccggctggtttcccatcgtctcgagctttgcgcaactttctcgcttcctctgctgccaacttggccttgacgtgattttcggacatttccttgaggatatcggcctgacttttgggtttctcccttcccttcgagtcgatagcgtcgaatattggtgcgatccccttgtacggtcccttgaacgatttggcgtcttccccagactcgccccatcgtgcgaccaacctcgccttgtcagcctcgtacctctctgcctttttctgcgcttccttggcgttccaaccgagtttgaaatgcctcgtcccaaagtccttgagcgccttgcctgcggaatccctgaacaaggcgatctcgtgaccttcggggatctccttgtcctgccacctgtcgggatcgttgggtttctcgggtggcacccattctggacctgcccaccagggtctatcccgcatggcgtctctccacggtttcgtcggatggttggcctctgcgatggcttcgatctctctcctctccttctccatgacctctgcctgtgccttgtacctcgccgcgctggcttcgtacgccttgatgtccttgtgagccttttcctcgttggccttgcgcttgtcggccagtttggccttttcctgcgtcttgcccgcttggaaagcgagttcgccgaaagcgtagacgaggggtacgatcgagatgccgagcaagatgagactgttccgttcgaggtttccctcggacaggccgatgaggaggatgggttgagcgcggaggacagagaggtagctctcgtcgggcatgacttcggtgacgatctcgtacctttcttgcacggtgacgtcggccgggtcgatcagctcggtctcgggagttatgaccaccgcgtcgggtttcttctgtccgaacgggaggttcatatcggcgcagagatcggggtccatcttgcaaagtatcactgtaaggcaggtcacatcagaatcgagtgcacggcgtggtcgaagcgggatggctcacgcaggtcgatcatggatctacctcccagcatgtcattcattcggggtgaccgagtcgcttcatcatcggcgagaggtgagtccgatttgggcgggccttgtcgaatgatcttttcagtataacccatagtggtcccgtcgggctgggtgatgatctgttccgttcgaatctcttgttgcccagctcgtccggccggaaggtgttcagcgggtgatcgcgcgccgtttcccacccaggtggagactgtctctatgttgactcccccggtgagtctggcgagcatgacgtcgagttcctcgggaaagatcgcgaacgccaagacgacgacggcggcgaacccgaccaaccctccgaggctcttgagatcatcgaattcgagtatcccaccgggttcatcgaggtcgtcgagctccctcttgcgcttcctcttgtcatcatcgtcgtcaccaccaccttcatctccagcaaacgccgcggagccttcaatatcgggcgcttttatccggtcttccaacctgtcccccgtactcttgaacccgccattgaggagcaggtacaacgggatccctagtacggcgacgaggagtgcgaggatgaacgtcggtgggatggaagatcgggtgtggggagcggtgggatcaaagggtacgagttgggtcttgacgggtccatcatacagcgctctgagtgaggtcggatcgtgtggtgcgagattggcacgggtgggtgcgacggctagaagacgtttcgtcgtgctcattcttggtcgagggtggtcatgcggattatggtcaccagttttgaggaccgtagcaaatagtggagtgatctgatggggattgtagagatgattgaacctggattactgggtatgatcgaaggtagtgagtgtgattgcatgcgcctcttgtttcaattctgaaacgcagatggtcgcggacgagacaaaggtaggtaggtaacggtaggcaaggtggaaataacaacagatgaccatcgacaatgagttgattacgtaattatcattctgtcatttcaacgcgtcgccctcacctttgacactttatcgacgcgtttgaatggaatcagggcagcaggtcgagttcgaatagagcacagtagctgagcacctgtgtacacttgctacctcgttgataacccagcaacaatccgccaacctctaagaaaggtgtacccaaacgatgcaatagtcacgaatcttgctccctcttgttaatcttgcctctctcgtcggaccccgcaggacgggggactcgctggtcgacgatgccttctcctcttcaaccgaacggactcttacaaaacaccctcatctcccccagcccgaacgcttcgaaacgtgccaaacctctatcttctacgccacgtcgaccgggtaagacgaaagtcgtcgaaaggaccaggttgaaacctgtcagtggggatgttttctactcggcttcgaccgcttcgtcctctaaaaccagcctgagcaagtcggtccctaacccatcgaccctcgcttcggtatcgggttcggattcgagaggacctaaacgtagaagaatctctggagaatatggacaggtcgataaagagaatcgagacgggtcgacggggtcgccctgggtacctaaagcttggcatcgagctccggggtatggcctcctcccttcctcccctggggctcgggccggggctcgagaccgggatagaaatcggaagggcgtcaaagaggaacccaagacggattcccctgttgcagaggaagacgacttcatgaaacacctcttggcggatatagagctcgacccgacaggcgggatcagtccggacgacaacgacgacaaagatgatgtcgatgatgacaatgagaatgcaagatcaccgggtgggaaacgcaaacgaatcgagctggatggcgaggtcgacgaatacggggatcaaggttgggattgggagggtctaatgggaccgggtctagaggacagtctcgaggttagcgaaaaagtggtgctcgacaaaggaccggtcaagcgggaatcgagaagcatcgagatccagtatgaggacgaacggcctggaaccgtacggcccgcgctgcaaaacgacaagaccaagcctgtttcaccttgccaatcagctctggataaagccggcgagaacgacttggacgaatttttcccattcgatttccccctctcgcaagaatcgttcctggacgaaccgggcccatccgtccccctctccagataccccattctgcaccctctcgtacacccactccgacctcccactactacaattaccacgacggacaaatcagcgggatctattccattccgaccgacaccctgggcgagatgctcggtcacggggatcctcgacgccgaggacgtagagtcccgttggggatggggggaaaaggtccttctcctcaccgacgtcaagacggggagacgatacaaggtcaacttgagggaggaagcggcagagatgctcgtcctcgtcggtaagtcctacatgtctaggaggcctcaccatgagtgcttcaaggcggaaagtcactcatgcgatcgcctcgtacgtgtgtccctgttggataggcgatatcgcgaatatcatctcgcccttgatagtggaaagctcttcaagcgcaaggaccctcgtcaaggaaaatcagctcggctccggatttgtcaagatgcatcctagcttgcccgccaaccctaccgtagtgccatccttcgggatctcggtcaaagaggaccccgacaccacagcggatcaagacggatcgccgatcgagatcatcgtctcgcataagtacccggagaactatttcatccatcatcctgacttcttgttaccaatgacgaccattgtcggggcactaggatgtcggagaaaaccgctagtgcagagcttgttgaagagtggtgctcagtgagtcatctcgacccacacgtcctcgaccgtctctcaaaacatgactgaatgcctcgtcccgtcgcttcatggcagcaacgccaccacgaaacccctgttgtacggaaacatcctccacgagctcttgcaggaatgtcttcagacgcaagagttcgacccggccagcatgaaacgaatcttggaacacatattgcaacgacctcagatgcagctcgacatgtgggccgccgagctgagcgtggaagatgtccgggtcgaagtctgggaaaagatcagcacgggcctcttgaactttgggccgagatgggtcgggcgagatccggccgaggacgcgttgatgcataattcgtcgtcaatgttggcgctctcgggtctacacgatatcgaagagtcgatctggtcaccaaaatgggggatgaagggaaaagtcgatgcgtccgtccacgccaacgtggtcatcagtaccaagtctgagcgcggcgtctccaccgttaaagatgatcagccaatgccgttcgagatcaagaccggtcgcgctgtgggagtgatggagcacagagcccagacgatgctatacacccttctgatggaggagcgatatcgtgagggccttctttcgctaacggtgcaccgtcccagtctgacgttttgtcctcttttcccattcatcgcgcttacagaaaccaaaatcgactccggcttgctatactacacacaaaccgacacgatgctcgaagtcaaggcggccagaccagagatccgatccctactggcagcccgcaacgagctagccgggtatctcgctcgaaagcgaatcgttcaagagacacgacaagcccgagccagtcagaagagtgaacatgggacgcaaaagactcagctgtcaccgcataaatctcagcgagcaggcaatacgcaggagatcgggatgatgccctcgggtataccgttggacatcgaggacatcggcatcctgccaccaaccactgacaatccgagagattgtcggaactgttatgcgagcgacggttgtatgctctaccgcaaggcgagtcagcgcactgagcgcggtagccaaaatcagtctgctgaatatcgtaccttttcgcagaccgtggacgcggctcctgtccacgcagacgatcctttggctgagatttatgagcggaaagcgggtcacctggacgaagcggacgcggtgttctttacgaaatgggagcacttgatcacactcgaggagcaagacatagtccagcacaagaaccagacgtggaccatgacagctgccgagcgagagcgttcaggacggtaaatttcgcgttgcttctgtcgcaaaggcgtttcgacggctcacacttctttgactaggtgctttgccgacatggtcatccgggatcacatcgatcagtccgagaccactctctccaaaattgcgcgtcacatctacacctttacgcgagatgaaaccagcacgatgatccgaggcgtcagctttctgaacggtcatattggcaaaaacgatccggtctcgctctcgatcgaaccggatctcatctccatcgcagtgggattcgtcgtcgagctgacaccgaccgaagtcaagatcggtactaatcagaagctggacgtggacgcgttacttgagcgcacaggacggctcgaccggcacggaggagattatcggccaatcttccgcatcgacaaggatgaaatgctcagcggtgctgcccgtatgcggaacaaccttgcccagctgttttattccgaggatgccggtggcgacacaaagaggcgggatctcgtcgtccatctgcaggagcccagattcgaggatgtgtgggctccagacgccaacgagattcccgatcacctcaacgcggatcaaaagaatgccatgagcaaagtgctcacggccaaggactatgcttgcattttgggtatgccaggtacgggaaagacgaccacgattgccgaaatcattcttgctctggttaagaggggaaaaagcgtactcttgacaagctatacacattccgctgtcgataccattctcaccaagttggtaaactcggatcacaagattctgcgactgggcaatatcgaaaaggttcgtttagttcagtctcagctttcgcccgtctcgatgatactgatcgactcgtcggtacttcgtgagataggttcatcccgacgtgcggcatctcacactagaggcttttacagacccgtcctccatatcacaactcgaagatattctcatgagccctcagattgtcgccacgacctgtctgtctatcgaccagtaagtctggttaaagcgacatttgccaaagaccgccgcgtgctgacacgcaacgccgctgtcagcccaatctttatacgacgccattttgactattgcattgttgacgaagcttctcaaatcacgctaccaacatgcctggggccattgaggtttgcggatacgtttgtcctggttggagaccatttccaactgccgcccatcgtcagtcactgtcctttccgacgcgtctcgctgtgaactaagtctagccgatgctttacaggtgaaaaatttagcagctcggcgaggaggccttgataccagtcttttccgccttttgacggacgctcaccccgaggcgacggtcgatctggggtatcaataccgaatgaacgaggatattatggcgctgtccaacaagctgatctacagcgggcgactaaagtgcggctccgagcaggtgcgagaccagaacttggttctgccgaaacgggagactacctgtcaatgtaccttgagtaaagtgctcgaggcaaggtgagatacaggcggatcgtttcaagaaaggtttggcgctgaacagggcggccttgtccatagcatccgctgcgtcttcgtgaatacggacaaacttgctgcaagagagtcacgattaggagatctggtccagaacgaaatggagggcaagcttgtcgatcgcgttcgtcaagcatttatagcatttttgcggcacaagtagctaacggtcgtccgtctgaacagttggtctcctctctcgttgccggcggaatcaagcaagaagacattggcgtcatcaccccctatcgccagcagatcaagcttctctcctcgctggtgcaccggcaacacccactggtcgaggttctgaccgccgacaagagtcaaggccgcgacaaggattgtattgtcatttcgatggtcaggagcaacgacattggtaacgtgagtgtctgcgaccaaatgagcggtgccacatttccctgacgtgagggttcaacgatccaggtcggggagctcttgcgcgattggcggcggatcaacgtctcgctcactcgtgccaagaagaagcttgtcatcttcggttcgcgaggcaccctccaatcggatcggttgctaagcgaattcttcgatctgatggacgagaggaattggactgtggacctgctcaaatcggatgaggaatgtctctgcgggcgagctgatacaatcgagccataacaaaatatcactactgtaaccggcaatgacgcctgtacccccgacacactactgtacctacactgtatccattagatcccatcttgcatctcgcagcattcggtcagagttattcatccgcaactgcccgatccatgggaatccaaagttgatcgacgttctacctttaccacttcgggtgggcggcgatcgacgtcatcggggaatgacgaatcttgatccggtgacctggctcgctcggggactatatagcgggtcaaggcatactgtgccaagtcgtacttcaatcgagtctgagctgtaactcgcctttcaccacatacacactccccatcaactcacccaaatcacaccacacatacattctagtcataatgtccgacttcgagggaaagaacagtatgtctcatccatccgctcgacaagattcgtgctgttgacggaccgacctgactcgtcttccctcagccggcaacgttatcggaggctacaaggctgctctgaacaacgacaagtaagcctatttagcagcttctctcgatgttatggtcttactcaccggacccgacttttaatctagcgtctctgaggaagctgtacgttcgcgcaggagcgttcggcttgctccgctcgctttactcacaagcccctttcaatcgcgttattttcttacagaaaaaggaggccgaggagaagatcgagcagatcaagaactctggtggagacatgtctgccgactacaagcctcctgcgcaggacaactacgacctccgttcctcggacaagtagagcgtctacctaagcctcgtagcccaaccaagttgtagcccgaaattgaaatgagcaaaccggtcgaaatccgatgtagcagaatgccacgaaactgttctcgtattgccgttgtggatttgacaccatgtgtaaagctactcgtttgagacctcgccctctgctgtcatctaggagacgacgccttggtgtatccgtctccggagctctgcgtatcgagacgaagcaggaagtgatggacctagaatcgagagtctaccaatctcggaggaatcacgccgccatgattctgcaaatccttgcttgaaccagcccttgtacaaagccgatctgaccggccggggatgccaaacaaagccagaacagccgacgtgccatctctccctctggagtggcctctcccatgctttgcgtttttcaaggggccggatgtgaacaagcacgattctgttctggccaacttgcacgtagtcttcaaaaagtcaacgccgctatgcttgatttcgcatgttctgctttactgtaatatgattatacaattggttgtgcttgtttcgcaaaattctcgactagagcccttcctcatcgccgtcgtttaccagatggtcaaaccaccgtcaatgttggtctgcgaaccggtaatgtctgtggatgggcgaggtcgcgatatcccgctgtcagtcattacgccctatagtgcgaatctcgaccaaacgcgccgactcacaagaagccctgtcgctgagcagcaagatggccatgccggcctgttcctcgggctgagaaggtcggcccatggggacatccttcatcttttcagccttcttctcctcgtcctgcaagaatccggcggtcatgtcggtcctaccggttcgaacaggaggcgtcagcagagtgtcgcagatctcgtgaggttctccttgtgcgaccagactcactcgacgtatccagggcagatgcagttgacgttgatacccatgtcggcccactccatagcgaggcacttggcgagcaagttgacggcaccctacggatatcaataaggcggttttagtggaactgtcgactggttctttcacaacgatacgatgctcaccttggaggcgttgtagaaacactgctggctgcccttgttggcgatcgagccagagatggctatacgacggcgcagatcggttagcttgatcgtcccatcttgacgataccgtccgacttggccgcaaacgctcagacttacaagaaacgatgacgacctttccgttcttgtacccgtgctccttccacaaggcggcacaagcctgagcgcagacgaaagcgccccagacgttggtatcaaagcacgcgtcaaagtcttccctcttggcctcgagggcgggcttttggttggcctgtccggcgttacagacgatcccgccgacgggaccaaggtcgtcgtacacctgcttgacgatctcgtgcatcttcgcctgatccgacgtgtcggcctggtaggcctttgctttcacgttgtagtcctcggcaatcttgtcggctacctgaggagcgtcagcagaggatcggtagataatggcctgagataagggggttcgtgggatttcagacgatggtcgcgagacgtaagctgagaaatttcactcacgacatgagcaccagcctgggcggcctgctcggcgatggctcgtccgattcctcggttacctccagtaacgataatggcctagaggtaggtcacacacatgtataagttgcacgattcagaaagaattgaaggaaatcgactggacgtaccttgccagagagatcaatgttccaaccggttccgaccatttttgcgatttcgtgtgtgtgataaagttgttttgtaagggcagagaaaaagagatttggttcgagtgagaagaggagcgaatatcaacgcgctatgaggatgtttgatgtggtcgtgtttgaatgttatatagggtcgaatattctttccttggattctggctggtgacgacgatcgagcggtgttcgatcgaggggatccgttgacctttgaccctcatcatcatcatcatcatcatcagccatcgaagcggttacgtcattttcacgtttcaacgggaaagagggtcgggcgttagcgaaactgttcagtgcagccggtacgaagctaccgtcatttcaacagtcgacaccgcgggtttggaataaagcgtacgatacacttgtagaacgacactgcgtctcgcaaggtctatcatggtcgttgcagctgaggttggaacacagaacatcggcctgcaagactcgacgacatctcgatcggtggtcccgcgcggtcttaatcgccgaggttgggttcgaccgttgccagatcttgagattcatccggctagacatgttgaacatcatcatgacccggttcatctggacatcggcggcatgaagctcaagtcagtctcactgtgcaactcgaacagtctggatcgtggtcaggcgaggggaaacccaacgttaccttgcctgatgaatttggccaggccaacgacctcggtgacccggaagtaaattttcgacctttttgcctccggtatccggatttccgatcgatcgctgaagcagagcaagtctctgggtctcgcctcgaacgacaaaagttggatggacttgcacttctacgaaagtcgatcacaatctggcttcacctctttcagaccgcacctggtccgaaacatccctgtagacatctatcatgtcgtccatctcgatagacccgaccctgaccgcctcggagatcgcaaacgccgtccacatcgaaaacccggaggataccgacctcctgaatatcggggacattgtcgagtcttgggatttcacttttcgttgggatgaggactgtaaacctgcttccgagctcgaaaagtgaggccaaactcctcctcaagctcatggtaaatccaggacggacgactgactgcgtacttttgacaacagatggcgacagattcccgacccgctggtagacgactacctcctgagcctcccgacctcgctcatctcgcccagagaagatcagttgcagatcctcatctcgcaagcaaattccggagagaactcttcggctcgtatactactggaccacttgactgcggaaccccccgagggtgtcaggtgctctgagcagaccatgagggatgcgcaggaatgtttttacaggttcgcggggggcttgttgctaggaaccttctacatcagcctggtcggagggttcagctcgtaaggcctgctcagtctgttacccggcagaagcacacatccgggagctgaacgctgtcgtcattatgctataacagtcctcggataacatcagttctgcatcagacttcgtacttggtcgctcccatcctgaaaaccaagccgcattcttcatcatcgtccggggatcattccagccacagttcaacggcgaatgcgacatcgtataatccaaccaatgaccagatcaacgacgtcgcttatgctcccatcactcctgccgtcaagcaacgtacctctgttcgactcctcgagacgctccagttcgtactggatatcatgggctctccgctactgtctgcacagaacatcatgcgttctccagaagatccgagcaaggtgatccaggaagacacactccgggtggggcctgggtgtatgaaaccgctcgtcggggaaggctggaggagcacggttagggtcaggttgttgcatggggtcgtcaggaggagggtcatgtccactgtgggaaaagagaaggaacaggggttcgacgggacggggaaaaaggttggatatgatttcgataaaggtgagtgggaggacaggctagcgaatgatgtgaggtcgatgttgatggaagaactgacttgtactggtcatacagatggatacccccttaatgccgaagatatgctcctcaccctcgcttcgttctgcgtcgctccgttgtgggcctgtcaacgaataggttcgccgatccccgctcgactgcaatccgcctatatcgcacactggaggcacgtcgggtattatctcggtgtgcctagcgacattctcgaacggcatatgcaagtggatctcgagcccctggttggcgcgcagacggaccatatgagggggcccaacaagatctttgcttcgtgcttgacgcacctgttcgctcatcccaaggatttggaagatacacagaggttgccaccaccgactctgcctctacttcataccgtggccgatatgccaccgttcgtcactccgttgaagaatcactttcgagccgcgaggttctttcttggagactcgctcgccaccgcattgaatatcccacggacgacccggttcgaacgactacgcttgaggggttactttctaggagtcaccttgcccgagaggttcggcaaggtctactggcgaaagtcgtgggacactcaacggcgggatctcacacgagaacttctcggcatcatggtccggttcaagctgtctggccggcgatccatgttccgtccacatgcggtcgtcccagggcaacagacaaaacaggagcccgacctcccctccgaggtgatcgagctcgaaaaggggcacggcgagatggataaacgggcggcgatgaaggcgtacctgaagtatcaggggctgatgatcgagatggtcgtcgtcggacttggggtggtcgggttgggaggatgggcaggatggaggatgtcgagcgggctcatggcgaggttcgcttgagtcggcgtggtcggcccagcatcatcaacaacatcaacaacatcattatcactactttgacacactgtatccaattttcaatccgggtccgagtgccctgccataccaaatctagcatacactttgcatctcattctaccttattactgataagcttccatcaccatcacagagtccagtccgtcagctcgtgatcacgagcgtcccgaaacccaaacgctatcagaggacgacgatattctcccttgaaacgccctattccggcggccgaccggagaaacctccttccacgaaggtgagaagatctgcagcttctggaacgagtttcgggcatcgtccgtgtgtgattaacaacgtgttcagaggtgtttcgtatgtacgagggatttctgttcgcatgaaacgtcgagagcgatatcaaggggtcaaggttgtaatcgatcaacagaatatggtttctcgctctcggcgtgcccggtctccccctgatgcgcgtagatggatgacgacgatcgcgatcgcgaaacccgggagcactgcagtaaaagaggcctcggggagggggacggggcgctctatgggaacgacggggagtttggtacttcgggttcctgtcgtcgtcggcgggggcggtgtcttcgtagactttccatccccccttccccctcgccagtgatgcgtggtctgatcccgtaagccagttcgaggcccgggcttggcttacgtgagatcgggctgtgtcgatattgcggaatgatgagattggcgcgacggatcttgatccatgggtgggtggaggggaaaacgtcgagctagattcttgaatcgctgttccgggtttgtttgcttttatgctgggggagatggcgaggtgtcgtcgagtcggccttgtcgcgtcgcttgccggccgtctctatctctattctttgaggcgagatgcgagccgatgaatgttttgatttgatgcgagatgaatcgtttatctcggccaccgtgaggggtcggttcagctctgctcacgcttgtgcgcgagggcaggattggctgcgcaaacgacaaacgaggattccgccgccaccgactcgcgcacgcgttacgccgccgtccgtggcctccccccccctcgttttggggggagggtgggacgtggctaccttttgatctcaaaccgtatgactcgatctcgacccgaactcccgacctgttctccatatgtcgatcttggatcttcaatcggtcttgtttgattcttcgagggacggtgggctgatcatgtctatttttttcgctcgggtgcaggtttgaaaccccatattagacgacttttgggtcacgatcggtcaggttaccgatccatatatcaaccgtgagcatcgacttttcacaatctttccctctaccactcgactcgactcgactcgctcgagcccgcctccgcgcactctcatgattaaaagaaaaagggtgtacccctacttgaccaaacccctccgtcgtcgcatccgtccacaaaccgggcttcgtcttgtgtggggggactgtcgacagaaccaaaatttccttaaattcaatgtcttcaaccatatgacctttgtcgcgcttcctctttcccctcgatctcgatctcgatttgttacggcgtttcgtgtcttttgaaagggatggaaagctgattctttgtcggtaattgtcggcgatgaaccgtagattagggtttcgttcgcaaggcttcgtagcgtgatggaccgagtgagtgcgaccctttcgcggtgacggctcgtaaagatcgccccggctgacatttcactcgaccctgtctcgcagcccctcgtcgtctgtggtccctcgggaacgggtaaatccaccctgctcaaccggctctttgccgcccacccgaccaagtttgggttttccatctcgcataccacccgttcgccccgcgcgggtgaagtcgacggggttaactaccactttaccaccgacgccgcctttgtcgaaatgatcaaccgtggggaattcatcgagaacgctcagttctcggggaaccggtacgggaccagcgtcaaggccgtcaaggacgttgccgatcaatcccgccgatgtatcctggatatcgatacccagggcgtcaagctcatcaaaaccaaccatcctacgctcaaccccgtctttctctttctctccccgccctcgttgcccgaactcaagacccgcttgacgggacgggggaccgagacgcaggaatcgctgcagaaacgtttggacgccgccatcgccgagatccagtacgcggtagacggcgggcacgatatcgtcgtcgtcaatgacgatgtggacagggcgtacgggttgttggaaaaggtcgctcttggggaatcggtccagggggacaagttgcccgagtttggattgtaagagcgcgaggggatggtctgaaactgtgttagatgcgggtgtgtttgtggggatcgacgttgtatcaagggttttatgggtttgattagaacagcataccatttcaatacgtcacagcaagccttgtcctcgatgcccaatctcgatctcgctaagcagtggtgtcgcggacaccgaagtttcgtggacccctggggctcagtttaagacacgcgatgcgtcagatgtggattggacatatcgtactgtcgaaattttgaatttgacgatcatccgagttgaatctcctataggagccaataagttactacaaatcggtcatccgcgagttcgcagaagcgcgtccctcggtcaccgcaatacaggcgacgaatgcagacgacgaaagcgatcttgacagctgtttgcactggatgctgggtcgagtcgtcatgcaattgccggtccttgatattttgcctgcacttccggatcgtcaactccaactcgcataccacgctcgataaatgtttcatggaatgccttgtcatatttgtcaattggcaaaggtctaaccaggaggtaattatatactacaaaccaagtgagtcacatcgatccgtccttcttctgttgttctcggaatcttaacgagaaacgcgcctcgcatagttgagtcctcggatagccaaggaaatgcgtacactagcactttcgaccctttttcggaagacgcgtgtacaagggctgaccaagaggtctggcagacggtgactacgagccgtgaaaccaggacgaattcactcgatgatcagctcgattatctagattctacgatcgcgagggccagacagaggttgagcacgctctcaggcttgcttaggccggaccttgtatactagcagtatctgtctgattcataacgattctgagtagaatcatcgcatccgaccctcggacgacctggagagttgacttcagcagagaccatgctgctcaaactccgggagatcctagacgacgaaagcgcgtctaggacggtgggggaatagcttccatcatgccacacaaatgatatttaagaaaacctttcggacattgctactatctgcgtcataaaccgagatatcctgcgtggtaaagttggaactgagtgtggcctctgtccagtcgaggttcagccaaccataaacacttcagttacgtgattgtaacgatgaaaacgccacggtccgtcgttttagatgaaaggacgacgtttcatcgaagagagcatcctcatagctaaaattctctagttttaccgagactgcaaatctcagtggctgacatgcatcagtaatcccggatccgaactaccttgacggacaagttggcgactcaaattcgatgacatacaggtatgataagatcctcctatcagcgattcacttccttgaactttccagaatgccttgcagtcaacgttgtctgacggttattgcatggtggagcaccaaccaatatcgaccgatctagtgtccaccgcattcgcggcaactgccacgtaggcagagatcaaccaaacgattatcgattcaccggccatgccaggctttagatgattattgtcgatcctaccgtgtccgctagcgcaacctttatatattttccattccaccgctaacatgttttacgcgactgaactttcgagacatgactgagaagcccgctaatattcatggtgcagcgtctctactaccgtcgcgcagtcgctcaaaaggcggagtcttaagctctcctcgaccagcgaatcgtgtgatttatcttttctcccaatccaggcgagatgtggcggtatatggcgagtcgaatcatcgaacgaaggaaaggaacgatcggtcctaagctcgtcagccggcatcaaatgccagatcgtgtacggatccatagtacggtcagaccggcggattatatatacaaaccgctttctggctgtgaacgagcttggaatcgtcaacggtctcgtgcacttatgattgggatccacatgagcgaatgtggcagactgcgcttctccaggtcgcacaatcccgacatagttactgcaattgactgtgtccctgttccatctgagccctcctgcagcctgagatgctttcgaaggattgaacaaagaatctgagagcgaaaagagattatttaaagcctacgacttgtcgtcgtaagaatagggaattctcacctcgaagtaacctccgtgcgatattttgagtaatgagcccagtgcctcgtcagccgcgccccatcgagctttgtgaggcggcccttcctgctgtgaattgaacgtgatcattttcttgattaggttatttctcgcgctcggctctcgcacagcataaaatctcactttgccccattcctccgcccacacgggccaaaatgccgtgaggggtcgctcgcctgaaagactcgttctccctgaagtaaagcgcttgaatcggatgccgaaaatgtcttgcgatcgaggcaatcttgtgcttttctgcgttgttatctttgcttcgattgactcatcgcgaaggcctccgccgtactccaatgacgagagcgcctgtaacaaatggggatcagctcatgtggtagctgttccgtcgactacgataggacttaccgatagtattccgccggcgatgagatcccaggttgtcatccacatcgctttccagtcgtcggtatcttgacacgtttgcgagtcggtgatcttcagatactgggcagcgagctccctcatccaccaaaacaccatggctagcatctctgcgtcacctcccgcttgcaacttgccgtgttcatcccgtccgaccggtccgggcgtccataattcattgtccagacctccgagcatgcccaacagaccaatgaacagtcgttgtcgctcgagagccttttcgagcttttctagatcggcatgacgaatgactacactgcgtggaagttgttctcgaaaatcgtcccaattctccatcgatgacagcagagtccgtcgcgttctcgggcgattgtgaagcagattcagaagatacccgagccagtgctgcaagactccggtctcagctgtcgcgcataaagctgccggttgctgccactcaccccagtgagaagtttctgccaacgttcgaaatctcggcctgccgacggatcgtccatggccatcatctcgccaatctgttcgagcgtgtcaggatcgatcccggcttgtgcgaagaaatggtcccggatggcactcctgggcattgcgagtccggtcacgagggttgttggtgtcggtgtcaggttggactgcgattcggcgagtcgtagttagcccttcgccgggactcgtgagtcgagaagcgtgactcaccaccatgcacgaccgtacgaatggcagagtcggtcgttcgcccgctgacaaagcgatcagttcgcgctgcaatttacgccgaaaaatcagccatgtacctctgggttgaggtcgcgatcccactgacctcccactcgtcaaagtctccgcatttcgccaacttctcgcacagtcctatatcccggacaagatcgcctagctgatccgtaaacctcttcccagacagaatgtcgatctttggaagaggcatgatctgtctgaaccgtcgatagaccgtcatgtcgaacgtcctgtccacgcaagtctgctcatcttcgttcaggggcggtgattgagccagaagtggctcgaggatgtgatatgattcggagagaggtgtactgggatagggtattgggagcgtttgatatgaagcggctagcacgacgatgaggtgggtcaagaagtcctgcctcggattcccgacattgggtcagccactgcgacgggatatttcatgaccataactcgactcgcctttcgaaaatgtaaccgcgctttaagctgatcgacctgttcttgcgggtctaccacgttgaatccgtacccaaacatcagcgagccgaggcggacgacgcatcgacggtacgactcacagcctgcggtatccaaccatttcaagccctgatccatccgctccaccacatcctccaacatcaagtcacactcgtcgtaccctagcgcatccactccatcctcgctcacacccggtactcccgtcttgccgagccttgggacggaccactctttccctccttcccagaggccagcggtatcgctggtaaaatcctccccatcgtacatgtgtcctcgagtgagttccgtccagacgaggtacatgcataatctgagggcatgcatgtatgggatgacgatgtgatgaaggaggtcgttctgcgtcccgccggcgagtaaagaagcggtgagaggatgtagttgcaagaggtatcgtgatgtaaagagggtttgaacgagtggagctccggtgtgatatgtgatctacagcacgtgaggttgtcagcgttgtccccgaacaggaagtctgaccggaacctacctcgagtcgtaacaacctgtccatgatctcgcagacgactgccggcgagagatcgagcaagtccaaccctgcctctgccttgcgattgtcttcgaggcctttacccgagcacccgctatccatacgtggatccagcatgaccaaggcgttcatagcttccatcatcgtcagatccggaagcttgaccatctccccaaactccaaatctgtcgtcatgtcgacatggctcaattagtccggtggactttcggcatgttctttgctttgacactgaccttggcatgccgagagaaattgagacgttatgtcccacatcggaggaagctcagccggagagctgtccatttcgtctgatgctgaaccgatcgaggcagtcgagcgagatcgctgagcagggcttcccgacaccctgtggcaaccggtttaagcctgctagcagtccgaaccgtgcctgttggttgtccgttagctatttcgaagcgtcttataagtaacagacagctttcaatgatacttcaacttctcgatttgacaaaagttagatgggttttgaagttcgcggagttcgagttgctcggggatatcgatatatgttgacgaatctcgcgcaatgccgtaacaggagaagccacaatcgcgtgggacggcggacgatatcagagctcggtttcaaagactatgccgatacagatcctgaattcacatcgcttcagatgtcaaggacgaggagaagtaacgaggacggcacgggacgtcaccgcagaagtcgtcaacgacctcgaaccttttgtctggccgtgaggtggccaaggtcatgcttgtaaggaagacccgaggggcatcttctagagaaccgtactcgagtatatacgcgtctaatggcactggcgatctatcacgcagtactcgtcggattcgaataaacgcagcggcgatatcgagatgagaaatgaggcagtgaaatgtgacatctatattaacggtttctgtgtgtatgtacgtactatcctcctgagatgaggaagataccttgagggtatgttggtacaagggtcgtgataatgatgctcgtaggtatgatgtgacttttggcgatgtgcaaacctgattgttcgcatgcacgcaagcaaggagacaccctagacttcggcgctggtcctagcagaagtcgcgacagagtcgatgaccttttcctggtgctcggcggaaccacgtttctcctgcgccatagcttcctgagcgccctggttctggataaagctcttcgatcgccaagcgggggtcttggagaggaagagagagtcgacctcgacgatgctcaatcccttggactcggggacgcaaaggtagatgaagacggccgatccgaccaggaaaccggcccagataaaagtgatttttgtgccaattttttcttggatgataggagccacgaacgtaatgattgtgttgaccccccagttcgtagccgttgcgagagtaacgcacttggcggcgagacgctgagggaaaacttcggcggccacgacccaggcgacgggtccgatagtcgaagcgaaaccagcaacaaagatggccgaaaacgcgatcaacgatttaccagctacatcaaagagggaggatcagccttggaagaatctaaaacaactgcgagacctgtcaaactcaccctcctgttgaccgggaagggcagtcgagacggcaccgacgatgatctgggaggcacccatgacgatacagccgatcaagaggaccgatcgacgacccatcttgtcgacagccaagattccggggaaagacatggcgacgttgacggcggagaggatgatgatgaagatgaagacgtcatcgattccggcgtatcgggcaaagacggatccgtacgaaaagtaaaagttgatacccgagagttgctgacaagcctggatgagacaaccgatcatggtcctccaggcgattcggtccttgttgctgaaaacttcggagtaacgggcttcacccaacttggcctcctcctccttggcgatcctcatctcctcgagctcgagcgtgatctcctcatcctcgggtgacaagtctcggagcttggccaagttgatcctagccttctcccaatcgcctcgaccggcgaggtaggcgggggactcgggcgagaggatgaaaccgataaggagcaaaccggaccagacaagggcgagaccgacagggagcctgtaggtgatgtcgccggtgtgcttggacattccgtaggtggtacagttgaccaagaagatactgcatacaaaggtcaagttataaggattgtcgctcgatttcgcggtcacgatcgcaactcacccaagagtaacgttcaactggaaggaaccggtgatcattcctcggagagcgggaggactggcctcggcctggaagacggggactaaaccagaggtggctccgactcccataccggccaacaatcgtccgacacagatctgaccccattcattgaaagccgagacttcgatggcgacaccgaccatgtagatgacgataaaggcgagacaagttcgtcgaagaccgtatcgactaccaagaggaccctaaaagttggggacggaacgaaatagttagcgcgttttgttattgcgcgaccggcaagcgcctcatccgtcgtcatcgttcgacttacactgctcaaagcgcccaagaaggctccgatacagaggataccagcgatggtagactgacgagtggtgggaagcgagtagttggtgcagacgccactagggtcgtaggtgtcgcaaataccgaatcgtcgaaggtaggcgggcaactggtaaagacccgaggtggaagagttctcccaaccaaagatcattcctgcgaacgattggaagagacatagcacgacggctttcttggatgatcgtgcggcgggcatggttgaagttatttgcctctatggatattgacttctgttgaacatctgggcgaattgagtcgtggccaagtgcaaaacaatactgaccgtcttatataggacctccgcaatcggatcgagcggggatggacggacgagttttcaccacgcagccgagcccacgggaacctcgacctacatcgtctcctctcttttcccgtccccgaaaggtcatgacaagttcctggggcggccgacgaggatccaagacgaagaggatgtgccaccgggcgctgatacaagctcgttctctggagaggtcgagggggtgatagagagctgtttgatatcggatcgtaccgagtgccgagcacgttctgggcgaaaaataaaagcctccgtctgtcatgtgacctgcgtcgatcggccaatgccgcggcaactttctcctgccgaacgtacctcgagtctcagctcagaccggacataggaaggcgagtgcgtatcggttggtatttagataggagggggggtgcattgcgttattcatcagccacagccggggctcaccgaccgaattacagccacctccgccggacaaccctgtttgctctatcggccgacccctttgccccgtcgatctgtcagctagctcgtctgcagagaaggagaagtgatcaggccccataccttttgacgcggtatattcgtggagctcgaaaacgagctggagatttgtgcgaatcatggagcactttagcgactactttgtgcagtagggcgaagaaaagaacgtttaagagcttgggttctagtggatgccatgacgcgtagcgggggtacaactcgcacccgcgggctcggtcatggggcgctacctctgtttccggatgtttcaatcaggtgatgtgacggaatggcaattgatgtctacaaacaggtgaccgtcaaccagcgagggcgtgaccagcggcggagagctcatagctaaacgatcagcaaatgttcaaccacaatcgtcgcagagctcgggctcgcgcgttactcgccttcgtggcttctagcttgaagaaccgcctgacctttaggaggctgttgtactcagcaaagcggcagcatattagctcttctcaagctgtcaactggattattgtttcgtccgtcgtatttgcaaggcgtttcaacgtatcctatctgtctgatcgagacgtgttcatctggatgaaggcgtctgtcactcggcgtcttgtctgatgtattaccattcgtccaccgttgccctcgatgtagacattctaggcaccactgctctactgtttcatgcccagatcctgcgccgaacggctggctgggtcatgtagatcgtgacagagaggcgcgccaaagctgcgactgacattggcgtcacgtatcactcccgtttggctctcttctgcatcagttcctcagcaactagaggatgaaaccagcacgatcaacggcgctatcttttgggcaaaaggttgcatgtttggtcagacgatgtttcgtcgtgtcgttcgcctcgggggtccagtaccgaagggcagcaacctgtgcgcaggacgcatacatttcgacattctcgggaacgatgtcgtcgcgaaacatcgacacaaagtgatagtcctcgttaggactgacatccatagccttttgataggcatattgccacaagcagttctgtgctccggtgaggatgtctcctctgcggataagatgtacgacaccccgcccagcaaaatcgattcgtgacgcccgcttcgtgctggagggaccggtgacctacgagtggagatcggtgtgtgtgtctgtagctgcgcaacaatttaaacttacgtaagaatctttgaaggagtcgcaacgatgtttggctatgatgatggcggacgggagggaaaccattgatattagtaggcaagtcgtgctcacatagaattcttactcgtctatcggctaggatgcgcgcctctcattagacttcggtcaaaatgatcgcgcgagggcggggttcgactccccggtaggaaaatatttttgctcccccgagcgatttgctgcgcgcgttgtaggttactttttttctcacgcgtgagaacccttttcgagcttggccaggacctccccttccccacctggcagtcaagaccgcctagatcgacatctccatcgacttcaatcatcgcaggcaggccctttgaaacgccacacaaccgcatctccagtctgtgagcttgcaatctacgacatatacctagtcagtactcgcaaccaaaaccctgcgtccggaaggagaggaggaccacgatgacagaattacgcgcttacaccatgtctcgtccctctgtcccgtccttttcttcgccctttcatatttggtcttgtgctctacctcggcctcattacgctggtcccgatctcgaatacattagataggaaccccacaacttccccaaacttccccaaaacgtctagcaaaatggctcctgaagaagaagagttggtcgactacgaggatgagatccaggacgaggtagctgcccccaccaccgcccccgccggaactggcaaggctgccgcaggagaaggcgagaagaagggaagctacgttggtatccacagtaccggtttcaggtaagatctctactatacgagaggagagcatgaatttgatactgacccgacgcgtcgtgaatcagggatttcctcttgaagcccgagcttctgcgtgctatctcggatctcggtttcgaacacccttcggagggcaagtcttgagtcttcctaccttcttcgcgccatcgtctccgctcgagacctcgatcgttgttactggggatgggctacccgaagggacgtgtttttgaacgcgcgtcgtggaccgaaccaggtggacatctgtcggcatcgagtcgggcctgaacgagaagttgttcattcgcgtcgccatcttcttgaccagggcgaagatgaatcctgcgtagcctctttggagcaatctcgccctgcaaattcgtcacaacgatcgagcccagagcggagacgaacaggtgcaagaacaagtcatccgacaagcgagcttatacgaccatctttctcttcctcctttctgtctctggcatggtcctttgctttcgcatttaccctccaccaacacagtccagcaagaatgtatcccccagtccatcttgggtcaggacgttctctgtcaagccaagtctggtatgggtaagaccgccgtcttcgtcttggccgtcctccagcagctcgagcccgtcgacggagaggtttcgaccatcatcctgtgtcacacccgagagttggctttccagatcaagaacgagttcaacaggttcaccaagtacatgcccgacgtcaggacttcggtcttttacggaggtacccctgtcaaggccgaccaggagatcttggccgacaagaccaagtgccctcacatcgttgtcggtacccccggaaggatgaacggattgacccgtgacaagagccttgacggttcgaaggtcaagatgttcgtcttggacgagtgtgacaagatgttggagcagctcggtaggtacgagattcgtcaccgatcgaagctgatactgacgagagaaatgatatgtacgattgatagacatgcgacgagacgttcaggagatcttcaggtcgactcccgctcacaagcaggtcatgatgttcagtgctactctcggaaaggaggtccgagtgacttgcaagaagttcatgcagaacgtaaggctttgcttatcgctcaacttaccagatgtcgttagctgaacctctctcgctgtcttagccccttgagatctacgtcgatgacgagaccaagttgactctgcacggtctgcagcagtactttgtcaagcttgctgagggtcaaaagaaccgaaagctcaacgacttgttggacagcctcgagttcaaccaggtaagatcatacgagagtgatcatgtggttcgactcgtattgatcacggcgtattgttactatgccaggtctgtatcttcgtcaagtccgttgcaagggctactgagttggacaggctcttgagggagtgcaacttccccagtatcgccattcactctgctcttgaccaggctgagcggtaagcttgacgccttgaacgtgatcagtggcatgtcgactgacgtttccctaccccgtcgcagaatcaaccgatacaagatgttcaagaacttcgagaagcgaatcctggttgctaccgacatctttggacgtggtatcgatgtcgagcgagtcaacgttgtcatcaactacgtgagtcgagatttgtatagttgcctgcttggtcccgtttcatctttgctaaccgcatctgacattcttgaccacaggatgcccctaccgatgctgactcttacttgcaccgagtcggtcgtgctggacgtttcggtaccaagggtcttggtatcacctttgtcaccaatgacgaggatgaggaggttttgaagaagatccaggagcgattcgtcgtcgccattcccgaccttcccgagcacatcgaggcttccacttacagtaagtagaatgcgcgagcatcgtctctcatgcgatcgaagcttatacctccatttgctttgcagtgactgcctgagcgcaatgtgtatggttgaggaagagcttggaagaagcagtcaaaagaatgccaatcgtcgaaattaccgtttcctactcaattcgtgccttgtacttgttgcctttggtataaacattgtttgatccagccaatctgcggctttgacttcttgaatgcgtgtcagcaccggccgtcattcgagcggtgttataagtgagatcatacgggtatggccgcatcctgtcttgggatctcggttgtccgggctgtgtgagggaaggggtgacgtgccgtgtttttcggatccgcgattgcgaggccgacgtcgacgcgcttcagccgaacctcgacgtcacgtccgaggttgcaggggggacacagctattcaagactcatcaaccaatccttcgtctgctcgatgtacatgtactgggctgtcaatctgaaggtagtctgcatataggattcatagaaccctattgaatcactgtaaaaatcagccgtctacatcgccgatagaacaggcgacaaaacacgtctgcgtttcccatcaccaccacgacagccgcggaatacgtcacggccctggcgttgcacacgctcttccccccaccacaagatctcgcacatcttttcacctctttgctggttcactcaccgacatcaaccacaaaggagtttgaccagcgtacctgctatctttctcatacagaggatcgattgtggtcaactagtcgacgtcataatcaacgcttcaccggctagatcgatcacagcttagaagcgaggtttgtccgcatcaaaaatggtcagtgagagctcttttcgccggcttgggtccgccgttccagggaagctgatcagcaccatatcagtcgagtcacccttctgctgatcccaagatcaacaaggtcctcgccaacctaaactcagagcgaaagaacctgctgggagcccaggcgtatattcgcgcacttcaagcgtcgtcccgaaacgaagccgttattcaacaagctcacaacgaagtcagaaatgctcaagcgaacatcaaattcctggaagacgagctcgccaagatgcaggtttctggtccaggaggcggctctggtggtagtccaggcccggccttgcctggcggacccggcagtccaggacgaagcgcgtccacgcaacaagcgatgcagcattcggcaagccctcaagggagaatgggaggctatcctggccctgggggccaacccggagcaggatccaacatgggatcccgaggtcactcgacgcctgccatgcactttcaaggcagcgagaggccgttgcctccacccccacctggtgcgccaggtaacgagatggtcagggcgggaggcggcccagcgaagacgtccacccaactgggtcagtgtggattggaaaactatcgatacactgcatcagctgatcgatttcctcgttgattctcccgcagacctgctgcgatatgacgctcccttgtccggacccaaaatctcacgtatgcttaaccagcttcagttcaagctacaagtggaggagcagtaccgtaagggtatcgaaaaaatggctcaactataccgagacgagggcgaccgtcgtttgaagaatgaaactgagagcaagaagcgggagtcggagaacaagattcagttgttgaagagggctttgaagcgttacgagacgttgaggcaattcgagaccggcgaggaggatgaaggtcagtgcgcgtgaagccgagccgtacgaagactccatactgatcgaccggcacattttacagaattcctgccagacggtcagcggaaagagaatctgcgcaaacctcttgctggaaagctcgtcatctcgctcaaaatggcgcgtgatctgaaccatgttcccctctctagaagatcgtcaaaggtgttcaacgagaccaccgtcgtcatcaagattgaaggcaatgagcggggcgtctcgcacccctcgcgcaacgacaagtggtacgaggagttcgacctcgtcatcgacaaggccaacgagatcgagttgacgatctacgacacgcaaaatggaggggatcctacgcctatcggaatgctctggctccgagtgagcgaggtcattgaagccttgcgtaggcaaaaggtcgaggcggatactcaaggcgctggatgggttccggctgccaccgctgtccgagcagctacgatcagaggacctgcgggaggtcctaccagcaacgcagactcttccttacaccgagaagcgaccaagcttggcggaagcgggcctctgagcaagactgtccagggaatcgatggctggtttgccgttgaaccggctggtgcagtcgcattgcatttggactttggtacgtagaaccttgcgtgcagctgtgacatgagtcagcgctgataatcgcgatttcaatgcagtcaaggaaaatgtcaagaagcgaccgtttgaccagcctggaggtcttggacgtcaaggcgccgtgcgaaagagacggggagacgtgttcgaaatgaacggacacaaattcgtacaacgacaattctaccaacctattctgtgtgcattgtgccaagaattcttgcttaccggagaaggctatcagtgtgaggattgtaggtatgcttgccacaaaaagtgctaccccaaggtggtcaccaagtgtatttccaagtccaacgccgataccgtaagttgggagtcagttcgaaaagattatctgatactcatcccgtccattcggcttttgatcacagcaaggagacgaggagaagatcaatcaccgaattccccatcgattccagacgattaccaacgtcagtgccaactggtgttgtcattgtggatacatgcttccccttggcagaaagaatgccaagaagtgttcaggtaagagttcaagacccgaggactaacgacgtaccactgacgctttgtcctctgctctgtagattgcgccctcacgtgtcacgcaacatgcgctcatttggtacccgacttttgcgggatgaccatggagatggccaacatattgctcaagcagcttagggatatcaagaccactcaggtccagcgaaagcctgcttcggtcacctccaagccagagccttcgccgcccatcttgcagggtccacctcaactcccgcccatcggtctgcagtacccctcgtcgcccgcccctgcagctcaaccgcctcctggaacctataatgtacccgttcctgcggatcagggttactctgcgccgacccgacaagatcaggtatcgcaatcgccctatcctcaacaacatcccgcagcgcagccaaagccgctattaccccctggtcgcccgagctacgagcaacagcctgctcctcgacacgagcccagtccagcccgccccggtcctcctcctcagcagcaggtatctcagcaggaccaccgtagccagcagatggttccggtcgcaaagccggcaccgactccttcggcctcgaagccagtcgtcaaggctcgcaaggtcggactggaggactttgacttcttggccgttttgggtaaaggaaactttggaaaagtcatgttggccgaggaaaagcgttcgcgttcactttatgccatcaaggtgttgaaaaaggagttcatcatcgaaaacgatgaagtcgagaggtaggacccccccccccctcccggcttatttacattgagcgcggccaagctgacattgagcatgattacttgcagtacgcaatcggagaagcgggtcttcatggcggctgctcaagaacgtcatcccttcttgcttggactacactcttgctttcaaactgagacgcgggtctacttcgtcatggaatacattagcggaggagatctcatgttgcatatccagaaaaagcaattcaccttgcgacaggccaagttctacgcctgtgaggttttgttggcgctgcagtatttccatagcaaaggaatcatctaccggtgtgtgcgagattccgttcgatgaatgcgatatacgactgacgagggttgcaaactgccgagtatagtgacctgaagctagacaatattcttctcaccctggacggccacatcaaggttgccgattacggtctctgcaaggaggacatgtggttcggcaagacgaccagcaccttctgcggaacccccgagtttatggcgccagaggtatgtcggcccttcccacatgtcacggttgatgacgaatctgacgaagggtttcctgcagattctcctcgagcaacgatacacgcgggccgtcgattggtgggcgttcggagtgttgacgtacgagatgttgctcggtcaatcgcctttccgaggagacgacgaagacgaaatctttgacgccattctcgaggacgagccgctctacccgatgtccatgccaggcgaggctgtcgatttactgcagagggtgagtaccgatctcgtgtccgaccgatcttggggaagggtcgatcagctaaccgatcgctcatgattgtagctgttgaaccgagacccgatccgacgattgggtgcgggagaggccgacgccgaggacatcaagaagcatccgttcttcagggacatcaactttgatgacgtctacaacaaaaagattcctcccatgtacttcccgcagattgtgagtttcgccggttctgccagacttgcctgtgggggaaatgtcgctaaacgtcccgaacgattctggcatgtctagggcaacccgactgatgtctctagtgagtaacgcagacacgccttgacacgattagtatactcagaatgtccctttgcgttcatagacttcgactcggagttcacgaaagaaaagcctacgctcacgcctgtgcatacacaattgagctcggccgaccaggctcaattctcaggattctcttgggtaagcctggttcgcaaacggcagggctgagacgtggctgacggggctccggatttggtcgtgattgtcttctgtagaccgccccctgggccgcttgaaacacgcgaggcaacgagtgttgagcacgaaaacaagatgatattggtcgcttcagacgcgagacggagaaaagacaagttgaaacgagacgagatgacgaccgagaaaaggtgcccgagagacaagaataccgtcgaagagggcgagtgcttagtagaagaatcgaaagatctgcctgtgaatgcttgtgaataccatacgtatatatattcctgccccttggctctttgactgccatgaccatgactgatcggccttacgcgatttcactactggtgatggggcatgtcgagtcaccctcgcggaagcaccaccgtattgaaaggttattgatttgatgaagacatgtggatagctgtgtcaacatcagagcagccggctcgtcaagactgccaaaccaactcggctgagcgatcgatctcaccgtttcatcggttttagttggaaaggaggtctcactctaccggagctaaaatgtcggccgacttttgctcccgaccggctgtcgccgacatgcatggcctccatatcgagatccactcgacgaccgatggtctcactcgatccaccctcgttgtcgaataccccattcagcattgctccgcacttcctgcctggtgagtttcgatgggtttcatcaatttacgacggggatcaaccctcctttggcccgtgctgaccccaatcctgcccctcgtcctcgtgcagcagggtcatcatcacgcatcacgtaccacaacgctttcggtgagttcctgtcgtcggtcgttttgatcgatcttgtgatggctctcgcttacattattcattcatcagtcttttttctccatcggctttgttgttgtttgatagctccctctcttcctctgccatcacgctcgcataatgatgggcatgatgggtatatatatcgacaacgattccccatcaccctcatgttttcgcctcttcacgacttctaccctttcattccacaatctgcctcttcctgctccaacatatcctcttctgcttgcaattcttctcccttctcgctcttcgccttccgaagactagcttgaccgtagtcccttcgaaaagctcacaccgagaatcctcaagatgtcccgtcgcatcagagaggccgaactggccaacccgtctaacgacgcggagaggatggaagccagccagaggatgaagtcgatgatgttgaccggtaagtctggattcatcgcttgatatttggtgcaagaacgaccgcgtctcattccgcgtcaacggtatcattttgtagattattacccgcgccccaactatggtaccagcggtaaacctattactgttctcgccaaccagttcgaggccaggttcaaaggccaaggcaagaccattcttcactacgacgtcgagatcaaccccgtcgtcaaggtttcaaaccagaagaagcccgtcggtcttctcaggcagtgttgggctcagtaagttcctgccgtcggatcaaactagactttggagtacgcgcatttacctggatcatctatccgcagcctcaagaaggagctcgccactcccgaagccaaagccttctacaatgccggtgcttacgatggccgcaaaaaccttttcactcccgagcccatcgccaaaggtaaaagcaaggctcacgagttcatcatcaaccttccggatgccgaccccaggccgggcgttcctgtcgaggaacaaggccgtaaattcaagatccagatcaagcacgtcgccgacattgacctagagtcgatcgcccagttctgtgctggaaagaggcaatctattcacaaccccgaagccatgttgaccgctttcatgtccgtcaacgtcctgttgaggtccaacctccacgagcggtacaccgcttcaggtgctcaagaacgtcgattcttctccatggatgaccatgttcccatctccaatggtgcggtggtcgctaaaggtttcgctcagtacgtctggtagccgcccttgctcgtaatcgtaagccttactgacgctgaacattgacttgatcagatccttccgacccgccatcggcaacccggccgtccagcttgacactgcgtactctgcctttgtcgctccgggacctctgatcgaagttgccaagggtctcctcggacgcaataatggtgggttccgtggtggtcgaggtggacctcgaggtggtcgaggcggtggtgaccgaggtggccgtggtgccggccgtggaggattcggaggaccccccgctcaagatgacgctctccagagtttgtctcaacatgacgtccagcgacttcgcaaggttctcttcggagccaagttcaaggtcactcacaggacccccaacaagatcatgtcgttcggtggactcagcttgaaatcggccgaggagctcacctttaccaaggacgacggtagcaagcagtccatcgccgcttacttcaagcagcagtacaacatcacactgagattccctcgtcttccgtgtgttgccaccggcaagaggacctacatccccatggagctcgtcatcatcgaacctttccaaagcttgccacctctcaaattgactccggatcagaccgccgagatgatcaaggtttccgccaagccccctgccgacaggcgggatgccatcatggcctggcgcaagaagctcgcctgggacactcgccctgtggtccaggcctggggtatcgagatccgcgaccagttcaccgaagtcccagctagggtcttgaacccgcctcagatcgcatacgccggcggagcgcgaggactcgtcaagcccggtggtggtgcttggaacttgcgaggcaagaagttcttcaaggctggaaagccgctcatggtaaacgagacgtgcatgtcagtcaagtcgagatcatggcagccaagtctgattcactctgtgcgccatgtcatagtcctggtcagtcgtgtctttcgaccgattcttcgacattcccaagatgcaagcctttatttccttcctcgtcgggcaaatgaaggcggttggtatcaacgtcgcgaacgaaaggcctccttgcatcggaccgaacaaccctgctggcgccggtgtcgtgagtcgagagcgcatatcactcaattcttgagatcggtcagctgacgtatcgagcgtgttctagttgacggccttgcaacaagctggcaaagctgcctttgatgccggaaagggccaaggcgctccccagctgatcgttgtcatcatgcccgctcgagaggtggctttgtacgaagagatcaagaggtgtgctgctaccaagtaagtatcgcaagctcaggtcatgttcgcaagccgtttgctcatgtccgctttgcgaaacaggctcaatgccccggtcccgacccagtgtctccaagccaagaagctctcgcaggatcgaggattggatcagtactgcgccaacgtgtccatgaagatcaacgccaaattgggaggtatcaatgtctcgatcccgctccgcgaactcgtatgtcggtgtggaccggtgtccgttaccgccttattctgccttccaaactgacttcgttccgtctcatcatttatcagcccggagtcaccgccaagaccatgctcatcggagccgatgttggacatcctccccagggcaacggagccatcaggccttccattgcggctaccgtcgcttcgaccaacggagaaaacaacaacttcaagccttgtgtccggtaagtcatcctcctctgcccttatgacgctgcagattcttgctgaatcgacagaggtcacacagtcttcaagaaggtaaaaaggaagccatcaccgacatgggtgctatggctacttatcatctcaaggagttcgagaagaatacccgcgctctgccggataccatcatcatgttccgtgatggtgttagtgaatcggtaagccttccgtttcaatccccatcttatctatgcataagctcacagcaatatcactcgacagcaatacgccgcgatcgtcgacatcgaatgcaaggccatcatcgatgccgctgccaagttcaagaagggttataaaccgaagttgacctgtaagccagatttctacctccgctagaacccttgaacctgaatgtggctcacgttgctgcttcgcagtcatcatctgtgccaagagacactctatgcgcttctttgccaaaaaccccaccgacaacgacaggtctggcaacttggtatgtctacgcgcgcggctcaacatgaacactttcgctgattatccacctccgaatctcctggtcttcagcctgccggtctcgttgtcgaccagaaggttacccatccttacgccttcgatttctacttgcaagctcacgcaggtctcgtcggaaccgtaagtggctaagctgtagggctttatcagtctccgtgatttactaaaagccgcctttgtctcttctcaggcccgacccacccatcttgtctgtctcagaaacgactcaaacttcaaggtgaggaagtcttcgatctatcaaactttgcttctgtccgatactgacgtgtcgacaacgatctctttgaataggtcgacgaggtccaaaggtatgcaactccaccagattgcccaagttgcattgtcgcgtctttgctgacgacggttccgtatcaggctggccaacgctttgtcatacaatttccaaagggctactcgatcgtgagttgccgctattacgatttgacatggctcatagacactgattggtatctccggatagtgtctcgatcgtttcgcttgcctactacgccggtatgccatgtttgttcgctcataacaagctcgttactgaccatgctcttttccgcttttgaagacttgatctgtacggctacccgatctatggtctacgagaatgacggtaccgagtacgaatcgaccgatgctggtactggtggcggtcctggaaccgttaggtctttgcccgccgagcaattcgatcctatggcaatcatggcgaagatcgaaaagggcggtctcttcaaccaagtccaatggtgagttttctatttcggagaccgatcctcaagcgagtatctgatgtcgatttgtgctgcgctttttaggtacatgtaaccgcgccttcaggttttcatcgctttcgcgcacgatgccccgttcatgtcgaacggcaatcgttcttagcagatgtctctctatactttccctacttatgctcagacgatccatcattacctggtcgctttgaaatacgtcacccgacttttcgtttcgtgaggtcttctgtggtcgttcctaagccagctcgcagcgttgtcctgacagctcagcgccttacaccgatcatcggttcgtaacggtcgtgtttggcagcgttttccatcccgagcgatataatacgcgcttttggcagcttcaagcacaccgcgactgccactacttgtcaacaggcctgacagctcagcttttataagtgtgacccgttacatgtttgattctacatctaaggccaagctactctttacaacttcaagcttgaatcgcgaactcttccggaacgaagctgagcaattccagaaccgtcttaccagcccgcttgcataatactgcacacttgtcattcttgaaggtcaccctccatactgcttctgatggcttggaaagctctcggatgaagtttccagtcttgatgtcccataacttcacccgaccgtcgtttcctcccgtcaggataaatcgatcatcaaactgaagcgaggtgaccgagttgtcatgcgcacaaatccgctgtagacaggtgtaggtcgagaggtcgaagataatgactctgccgtccgatccaccagtcacgaggatatctccagagagcttgagttgaccaacaagcgaagtatgaccttgcagcagggcaacgcattcactacatttcgaacatcgttagaatcctgcggtagaagcaggatggataacgcgagtgacttacccggtagccgcagaccaaattcgtaccgtcgaatcgagactgccagttgcaaccttttcaccatcaaaggcgacatcgtagatctggtggtagtggccacgtagaacgtgtagacattctccagtttccaaattccaaacctgcgtatgacacgataagtatgaaggtcttactgacgggtagatcaagaccgctctgcttaccctggccgtgcaatcatagcttccactgacgcaataatgaccagcgatttcgatgcacctgactgaatgtgtgtgacctgccagatgatgcaggctgactcctctctcgatatcccagactctaatgctcgcgtcccgcgctccggtcacagcgacaggacgaccatcgagaaccttgaggcatcggatcgtagatgtgtggccatgcatcgtgtgaaggcactccctgaggtggtgggtgaactgtgatcagcatagtgtcttacacgcgccaccttggtctacctcttcgtcgactcacccagtttcaagatcccacaccttgacgtcgcgatcgcaacctccactgacgatgaactgctgcttctggccccaaccgtgagcggcattggcgggatcgctggtttgccacctgctcccgtagatctcgacgccagggtaccggggtccgaaggggccattaggatcgtatgaaccaggctgagtacgcagtcccgactgagttgattggctcgaactaccgttcgcttgatgcgatggcagacctcctctgtagctgctctcgcccaatgaggcgcgacgggtgtcgcccctagacctctttctcgcctttgctcggcctgacgagtctgggtcgttatcgtaggatcccatattgaaattgagctcgccatccatgccgatctcgtcgttgtatatcccatcgctaggtggcgggccgttgctgacaagatataatgcccaaaccccaagctcatgaccggcaaaagtgcggatgaatttccctctttcggcttcgaagaggtgaattttggtattggccattccgatgacgatgtaatcggtgttcatggcaagtgtcgtgacgaccccttcatccgtcgaagtatgcgtcgaaaggagtcgtccaccacgtaaccagttcgactctgaagaaaagacgaattgagctcgaacctatataacggcatggggaaacgcgggtcttacccgtcaggtaagctttcttgaagtgattcttgtacgaaaaccctggagcttcggtagctacatcttccggctttttcgtcccgtagctagggtttcgcctgttctgcatgaggatcggctcgggaacgctcgcgctccgtccgaatccactctggcttgatgagctcgcgaccatgccgattctgtcctccctgtttgtcgtatagatatctctatgatcgacagacaatggccggttgatgtatgaggccgaatcgaagggcgagatggtgtttgcggctgcggcagcacgggcgtctgtctgattgagacccagacccatgtggaactgttgaccctgcatcgaagagctggtcacggccgagggcgagacgatgctcggcatgggtgggagctgcccgttggtctgaccggtgtaggacgccggatcgatattattgaatggaatcgagggcgtcgaggtgatgtgataggcgccgggcatgacctgttcccgagcttgatgctgttccggctggctgcgtctcggcatatgcgactctgcggcggggtaggacagaggttgcggcgcatagttagtgtatgtcgaacgcagagcttgcgcgatcggttgcccgtagtccacgtgaccattctcgatcggcatgcgggtttcctcctcttcatactcgtcctcgttctcgtcatagtcgtgctcgtcttcatcctcttcctcttcctgctcttcctcgtcatcattactagcctgcatgatccccgtattccttcccaccctactcgccgaaaacatggtcgggttggtgattccgaactgcggggtcaacctgttcgtgctgctcggaatggctgatacggtccccgcgacgagggcagcgttgggtacgttgcgtgtgggcgtcaagaccgggatggccgggaggatttcggcagtctggaaccggtgacgctcgcacatgcccttccacgtcttttcgtcctgcaagagccggtaccagtgtttcgatacgagggacgctctggccaatgtcgtcgggtcgtcaatctacgagaaacgaggcgaatgggactcagcacgttcgacttccagcgtcatcgggtattgtccgtgtgcagtgactcacaaagctcaggacgtgcaagcccagctcgataggcagctctcgcaagaagtccctcttcagcctgggtccgatgttggcgttcagcatcaagagctccggggtcgacaacagtggcaacaggtcgttcaaaagcctcaaccgggtaggtggcggcaatgacgggaaggcgatcaacaattgagctgggtctgttttcccctcgtcggagatgtttcgtcaatctcaaaagagtccccgtgcttgcactgtaacccagactcggaactcaccgaagccactgatgtctccactacccgacgtactacctggtactccaccttcactcccgtccctcgctacggtaccccaccacccattcctccccggcgtcggggaaggcgcaggcgtgggcggactcatcaacgtcttcaaatccagcgccgtcgtcgccgccgccccggatgctcccctcgggggtcggcttgacgctgatcctgatcccgaatcgcgatcgtgttcgtgtggtagggtctggtcgaacgacttgtccgaagtcggggtgagcggtcctttgcccgtgtgagaggtcatgtgttgatgactccccccgagtccaccttgaccctggatgaccgtggtaaccgtgccgttcgggttcaaggtggtattgatcgtcccacccgttgaagctgggaggggcaccatggctcgtccgccagttgggtcgttgttataaatggggatgggcgggatatggcttctcgagggtcctctcaggtgcgtggatcggttccatggaatagaagcagcgatggaagaggatgcttgcgctcccaagctcgaaggcaagctcgaggttggcatggagtttagacccgagccttgtgacgagaagacgggaaccgaagagggcaatcccgagtatgattgaaactccctacccggtggcattgacgtcgacgtcgatgccgacgtcgaattcattgtcggtgcaatcctagaggtcatgttcatcccttgaccgacatcattctcatcgccttgcgccctctcctcgtccatctgatcaaactcgtccaactcggccgggtcgacatccatcagatccagccgctccggtctagtgttagtcatcttcctcgacccgccggcaacagtaggttttctctcaggcgtcttccagaggttatttctggattgggcgtcgtgattgtttcgcgaggtcgaattcgaattcgacggtcgggcgtttgaagtcgagctcgagctcgagcccgagggcgggagtgaagggttatgctgcaggtagttcataccgaagctggcgatgatcgaggcttgggtctcgttaggaggatgaaacgtggcggagctctgtatgcatcatgagatggtcaacgaacgcacgtacaagagccgggggcttgtgtacgagagacgtaccagctctctgccttgtctctcgattgaacagtagttgagcctctggcgatcgcttctgacccggcgtgacgttgcagcgaggagattataccggggagtctagaagtgctgtcattatccacaatgacaaccgtgcgtctattgtcggtaagtgattcgaccgatagacagtggacgaatcgacttgccgttgatgactgcgtggtatgctcacgacctcgtgatgcgatccaggtgcgatccgggtgcgatcctcgaccaggacttgtacctcgtgattctaggtcgttacaagaaaggtggtgctctatctcgggaagatgaattgttcaagagttcggtgagatgaatgaggcgatgatgtcgatacaggtaaagtcatgaccctatcgatgatcaagcaggcagcaggcagaggtaaggtcacacaaggtcagaggctatcgggcgctaagtcaacaactaatgacggcagtttgcgtaatttgtgattctcgtcataatctcgtaatctcactaccctgcccacagaatgacatcacgtgatcgagcggtcgagcgttcccgttccagggttagagtcgagttggaacatctacaacaacgtatagtacatcatcgtattgtacgttcaaatcctgcccgaaagccgtgcttgaaatcccactcacctcgtcaagctgggaatatagtcgaggaacaagatacgatgaccaccttgccagatttcaaaaaggggatcgactactggaaggcggtggatgcgacagtggacggcgtcctcggaggatttggcgaaggggtgagatcgagatcgtctgctatacaacctgaaaaaatgtgtacacgcacgctaacgagctcggatctcgcatatcggacctcagcccttgcctcgagtcgaacaactctcgtcccgactcttccttctctcactcttaccgcaactacaaacctttccttccccgctctctgcccccgcacaccagatccccccgacgtcgaacaaacgttacctcgggctagacgtcggtgctggtgtcggacgggtgaccaagaacaccttgttacccctcttggacgacgtgatcaccatggaacccgtaccccatttcatccaggcggccaagaaggaagcgaccgagggtggatggacctttttggaagatcggagcgggaacgccgtgtcgaccaccaaacgtcaaaaaccggctccgtcgtcgtcttcttccaaaaaggcccgagctgcgtcttccgacgaggacgatatggacgaagatgacgagggtaaccctttgcccgtggacaagctcgggaatcggatcccgaagccctcgtcggcgaataagaaggtcacagggaaacgagtttggttcgttcaagctcctctcaacgacctcgacccggcggaccctctcagcgggaaagaagccaagagcttgggcgtcatcgggatggaaggacgggggttgggagccggggacgaacggttcggggagaaaatgggcgaggtcgcgtatgacgtgtgagtaggcaggtcagggtcgaccagatagacgaattggtggctaacactcaatctgtcggacttcccggtttcacgcgtacagtatctggtgtcaatggtgtctcggccatctttcaaatccggaactcgtttctttcctcaaacgatgccacgccgctctcttgcctaccgcttcctcgaaatcatcatcatcgtcgtcgtcgggtacggtcaaggatacctcggcttatcaagacccgggcgcggtgatcgtcgtcaaggaaaacgtatgcgaggatggaccgggcgggacgggcgtgagcgtgttggacgaggaagatagcagtctgaccaggtcagtcccaagcgtttgccctctcccctgagcacgtcgaggttggggatcactaacgcgtttgctcttccgaatcgaccacatggatctcgctactaccgctttggccccgactctaccctacattctcgtcacacaacaataggtcgaacaagatgtgggaagagacgtttgaacaagccgggttgaagatcgtcaaggaggaagttcagctgggattaccgcaagggttgttcatggtcaagagctgggcgttgcgatgaggtcaggccgggtaaacgagaggggaagcaggcaaacgggaggagacgcgcagctgattgggaggtcggacgtcacgaagagctcttctcttcatcgccagacttgtgggcttcttagtctagcctcccaaggccatttcgaaaagctcgggacagccacaagggagcttttcgacgagatttggctcgggaccgagatccggtccgaaacctacgacgggattctgcaatactaagagacgtcatgatcttgtaacgcaagaaatgtcattccctagcttgcaaatgatcgatagctagagtgtattgattctcgacttgttatcagccgaccgcgatgttgagcgattcggttacctttcagtcttgagttgaatgatctattttcgagattgcttccgggtcgattcgatttgcccccgagatgtgatcgacatatgtcgatgaatcaatcgcgttggtctgttaaccacttggacggacatgagcatcgtgaaattctggttcggagcgatcccgacagagggacaatctagaacccatattgctgctcccggtaccaacacgagtcgattgacggaagggctggccgaaaagatctggattctcgaacgtaaggagcatctgtaagtacaccgtagacaagtaccccattcgggactgaatcgatatacgtgcgtttcagaattggagccccgctgccgacgtctggcaaggattcgaagccatgttcaaagctttcgctcgggtagcagctcgctcaatagcgatccagctcgaggaggccgctgcggctgccaaagccaaacaaccctacgtggatcccatccccaaaatccaccagtacaacgctgcgagcaaggaaaaggccgtcgagaggaacgtactaggagctgcactagtggaaaagaagcacgaaatctccacttctcccactgtgcatgatgtcgagaagttggagccggtagagctcgctgaaaccccgaaggcctcagtactaccggatgttcaaaaggctcggccggcaaacccatatataattcgaccggccgatggatcggacaccagcttgaagaccgaatcttttcctgaggcctcaactccggcaacaacaccaaattcgcagatcgagggtcgtcccgctacggcaaatcctgtaacaagcatacccgagcgagatgcaccggttgccgttgcaacaacgtcgaagtcggtcgagctcgatgaggcgccgatagagccttctcaggcgatggacgatgtcgaaccggagacggtaattcgatctagtgaagtcgtgggccaatttcgttcttaccaacacgccttgccttctcccaggctcctgtcacgctgcgaccaagcaaagtcccatcttcacgcttaggcagactcttccattatgggtgtgagtttaccgctgcgcctgacatctcggatcgtttctgattgtaccggactataattcactacagccctggtagctggtctatcggttggcgctgcatctgaagctgttcgacgaacagctggaggcggcagcactggcagcctgatgatgtctgaagccaatgttaaaaggctagtagggaaattgagtcagatgagaggtgccgctctcaagcttgggcaattcatgagcattcaaggtcagttcacgaggtcgcaacgctggtcatcacgagggaggcttatgaaggcatgcacctagatacgaatatgctgccagaacagctagaaagggttctgcagcaggtccaagcgaatgcagattatatgccagactggcagctcgaggtgtgtgcgagaccgttgcgccactgtgcacctagagactgaatctctttttcgactgctagcgagtcctgcgggcggaactcggagacgactgggagtcgcatttctcctcgttcccgcgggtccctatggccgcagcctccatcgggcaggtccatcgagcggttctcaagtcgaccggaaaagaggtcgctgtcaaggtgcaatttcctggcatccacgactcgatcacctccgacttgaacaacatctcgctactccttcggacctctgcgatccttccccgaggtctctacctgaacaacactatttcagtgtttaggaaagagctggcagacgagtgcgattacgtcctggaagcagacaatcagcgaaagatgagactgttcctacaggagcagaacgaggaattctttgaagtgcccgctgtcattgatgaactttgcaccaagagagtcttgacaaccgagattcagcccgggaagcctctctcccagatcaagcaatttgaccaggctctgcgagacaaggtgagccgtcctgttcagggaccagcactgtctcgctcatccgacattctgggatagatcggaaccgccgtcctgcgtctttgcatcaccgagttgttccaattccgtctgatgcaaaccgatccgaattgggccaacttcctctatgatcggaaacgggacaaggtgtgtttgaaggcgcagcgggtctggaactcaagtccgcatgtttgaccatcttttgattatagctcggcttgatcgactttggcgccacgagatcgtactcggtcgagtttatggacaattggtaccgactgctgtcatccgtcatcgcgggggaccgagtagccatgcaaaagtactctttggaagtcggctacttgaccggggaagagcacgaggtgagtctacctcgatatcgcccaaatcatcgtgctattattgaccggcatctcctgactcgtaggacatggtcaacgctcatctccgatcgatggagctactggccgagccgttcacccagacgacctacgactttgctcgacaatccgttaccgacgaagtccgcaagcttatcccagtcatgctcaaacaccgtctcacgccacctccaaacgagacgtacagcctgaaccgaaagttgagcgggagctttttgctctgcgccaagttggggagcaaagtcaactgccgaaagatctgggaagaagtcgtaggcaattacaagccgacgacgggtgcttgatccagaggctcgccttgaagttgttctgccctttcatgatccaaagcgataatagtgaacatagatgtcgtcatgattggtgtcttcgttggaagtgacagatatacaaccgagtatgcaaggtgcagggtgggaacagtaacgataccccatcgtccaggtcgtcatggtgattgggtgccgagcagtctactcgtcatccgagggttttggtgggggactagaggaaagcgagaaataaattaagctcctaggctctgaacgggaaccgagactcgaacactcacccgcaaggctgcagcatcctctattgtcatgagcaggccggggcaatatagcgattcagctctagtcacgatgagagagagagctgaaaaggacggaaaactgacctcgaccatctcaaactttgtcctggcgatgcactcgttctcggcgatcgctatgtatgccgccaatccgggatgaccgacgatggaactgcattatagcgcaatgagatgacacaagggaagagttcgagtcagcagggtcaaacgaagccagtctgtgcgaatcgaggttggctggtgactcacgcataggtatctcgatgttggtgcaccaaccactcgtgcttggtcacatcggcatggcctggtcatgacgcacgtatagatcgataagcagctattgtacgacgacgctcgtacatgctggatgcttaccagtaccggtgtaccgagaatgaagcgattcgagttgcgagtttgcggtatatcggaggtcggactatagcgaacaatgttcagtcaatcagttgggatattttggtagcagcaacaaggtagcctctcactcaccatgatgaagaattacgagttctaccacagcgaagaatattgcaaggggtagggtcgttcctataccagacacatacatagaagtctatcgacatcgccggcgtagagggggaagtgggtctttagatgctgattagggaaacgcgtgtgaaacccagtcgcgtgtttgtgaggtgatcaccttaaaacttgacaaccacgccgaggaacccagagcggccatctatcgctggacaagtgctcatcagccaaaagcacacccttgtcgacgtccagactacgctctactagacatcagatcatacgatacaggtatagatcttctaggtcactcggctttggatcagtgatagatctcggagaagcgtagaacgacctctggggcaatcaaagctagcgaactttggtaagcactctacgcatgtcatgcgtgatagcgccgcatcgccatgctcatacctcgacttgctcttgctctcatcacggatctttgaatacctttcgctcgccttctggatcatactttcgtcacgccattcgatagctagataaaaggcaaattatcacgcatcaggcgaaagcggttgcttggtgattagctggttagtcattccgcacgtaacgcatcgatagacatcccgcatctactgactagcaggcatcctttcgcgtcatttttgtttctgtttgatactggaccgcggctctgctggtggctataggatcatgcagatgcaacagcaacagccgccatcacaggcccaatcgactcagcaacaacaagctcagagggggtactacatggctgctgccgcaggtgcgaacctgagaccgagtcaaccgggtgtagctggaacgccaagctatgctgcgggactgcagggcagacggacgaacggtatgtcgagtagttccctgccgaatcgaagatacccgagctgattgatcgacttgccgctcgtcaacagctatgccagacgctagcgactttcctgctctgacaccaacctcgcaacacccgccaaatctgccacactcctcttctcagacgtcatacgcatcacaagcacaacagtcggcagcagcagcagcggcttcctcggatagccagcagatgcaaagcccagcatcaggtccagctctaacgcaaaaccagacgccaggtcagacttcgacattaccacaacctcctccacatctcgcacatatgcaacagcagcatcagcagtcgcaaggctcgatgccggtaccacctcccggtctgggggggacaccgatggctcagaaccaacaggtgcatatggggcagatgacgaatggggagacacacaaggaagagtttccggcactaggcggtcagggcaaggacgtgagttggcagccagttggcagctcgtgaggaagcgtcgtcactgacgatacacgaaccccccctcagccaaatcattcgatcaagtcgacgacctctccacctcccaacctgatcaacacctcgcaagcctcgtcatcctcgcaaccattccctacttctgatctatcgcaatcccaccctacgctacaacttccaccgggcatgagccactttgccgcatctcatgatccgtcaatacctttgacgaaaccgtcacaacagctggtggctagtcccgtggacaagtgggggctcagcgcgctactgagactaatacgaaccgggggacgggacgaccagttgacgctgagtctaggggaggatctcgccaacatcggattggacatgaacagtgcagggtgagtagttacgctgatgcgtcgagccgacacgcgctgaccccatcactccgcctagacctctctactcgacatttatcgccccattcgccgagccagacgcactgcgaggggtgtacctggaagaggaatggaggacaccgcagtgctacaatgtcaatacgccaccagcatcgagcaagatcagcatgttttcggacgagacgctattttacgcattctacgcgtttcctcgggatttgttgcagatggaggtctcggccgaactgtgagttgtcgacagcgtttccgctagatggacagaacgatgatgaggggtgactgatctgacctcacgtgcctcgctcgtcatcccaggtacgcaagacaatggcggtatcacaaggagctctccgtctggctcacaaaagacccaggcgtcgatcccatcgaaaagggacccaactatgaacgaggaacgtacatcatctttgacccggccgtctttagccgcgtggagacccccaaggactttacgctgcaatacgacctgttggaagaccgaccggtcatcgttccgccaccagccttgttgcagcaagtgcaacaggggcagaaccaacctcagggtcaacaacaggctcaacagacacctcagccggcgagtcagcaacagcagacgcaagggcaggcccaggtgtcggggcagcaaacgcaagagggaaagcggtagaagcggtcgggagtgaagactggggaatggggtccggtggcctggaacgttcgtttgtacgctttcggccttgttcagagatgattatgcggtttctttcgatacgggacttgggactcatgcaaggggatttgcaaggcatcgcggagaaaggcgttgggcgacgtttgcgatcgaggaatggcagcgtcgtcgacgttgggtatacaagtcgatgggaacagtcacaagattcgaatgaaaaaatcatacaaagtggtacgaagcaaggcttggaagacagtgaccgaacagcgttactcgccgacgaagatgccggcaatgcggcagagacaagagagaggaaacgaggggaggtagtcagttcttgtgaagaggtcgaatcggcgaagaccatgttacttacgggccaacgggagtccccgcccggacggccaaagtagcaatgcgagagaagtgcgattcgttagtcggctgcgacgtggctgagtatgaggcgtagaggacttacggggcatgagaaggccccgtgcgggcgtcggtcgtcgacgcgaccggaggtgacctgttcgagagtgctgaggtcgagttggtcagcttactgtaagcagacggctcgagagagagaacccgaagccgaacagagcctcccaaacccaaacccaaacaccctccagcccgaatccggcccaagcccgatccgaaaccgaccaccagtcaacatcgtcgcgccggtcaaccaccctgatactaggcctaacctctcatcgttgaccgattcctgccgaattatagtaccaccagggtatgacagcagcggaggacggacgcggacgagatgaaactgcttttcgcagagcttcagtccggcgcgtcgaggttgggtccgatgatcgttgacgtttcgagttcgagtccgatccaggccgaagggcgtagggtatgagatgagaacggagagtaagaagggatgagtgaaaaaagaagccgaaagaatcaaagccgaaacgaaaagaagaagagaccgaaacgagcggaaaaaaaaaccaagagaatcacaaccaccatacgcccgaggcaatctttcggtccttttcggtaccctgttgcgcttcccattgtcggatcaggtgctggacgtgaacgcgaccgggtcgggtcgtaggtcgggcgggccggccgtcttcgtgttcctccttgatgctgtagatggtcctgttcatgatgaccagttccgcgtcccgaagaggcgcgtactcgataaccggcgagcagctcttgacctctttgtactttacctctttcacttcgacggcgatccccatgggctcttcatcctcctcctcgtcctcctctgagatggcgatcagagcggcgatggggaaacccttcttgatagggctggcgggcgccgcaatggtggcggcagtcggaaaggcgatgtcggtcttgacgatggcggaagacgaccgagcttgaaggtacttggcgggaatgacagggacgggaggcgcgtccgctgcgacttgaaagtacgtcgtcaacttgagtccttgcttgcggtgtcgcctcctggtcttgtcgggagtcccgggcctcgtaggaatgcacgccgactcctcgcgctcctccgttaccttttcggacacctcgatctgaaccacctcgactcgcacgctctcgattatcaccgcctcgatcttctcatcctcctcgaacatcatcttctcgtccaacaccgacgactcgtcctctcgtaccaccatcatctcctccgaagccgtctcgaaccttgcggtttggtcttggacttcccttcctccctgcttcttcgcaacgcggttcaaagctttgatgagcgagttgaacattttaatctcgtttgagtttgagtttgagttttgttttaaaaacgtttaagtttggtaaacttgtgaaaggttgtgcgtatgcgtgtaagagcagggagtaagggaagtgaagaaaagaaaagagtagtggacgtttggaaaaaggggggggggagacgtcctggggtccgagtatttatgttcatcggccatcgaatcccctcgagggggaagggtgattcaacaccatcgagtgagagaaaaatggagatggctcgactcactgtcatcactggatatcatggttgaaccttggttacagtggttagccatttcctctgtcgcccgaaggcatctcgaagacaggacgtgcgtcgaggtctgacgtttgacggcgaatggttgtcaaattgaagcttgtcagtcattcattgccagggcgaaatgatgaatagagcagctagccatcttcatctctagtccgttattttgaatctctcgtctgtaggcgtgagtaggaggaggtggatatcaggtcccgatccttgatgatggatgtcaatgatctggaattttattcgtcgcttcgtctcgagcggatgttagtcgacagttcgagaggagagagtcgggcaaacgccgtatacagggacggaacgagttcccattctagcgctcctgccatttatgtaggcttgaagcttgaatatgcgaattttgtgatgtggatgttttgtcgattcggactgggtacggccaatgtaccgaatcccgcgctttcgacaggtagaggtcgcgggaaacgtcgcatcgttccgctcaacctcgcattcggtagatgcatcaatcaaaaccctatatggccaacttgtggaggtatagctcttgtggttgagccacaaagtcgaccaacgtcgagcgttgcctccttttgaatatgccatatcgatgatccgggctaactggaattcatcatcggaagtagatcaccttctattcgttccgggaggggcggtatggcgtttccagggcgaatagatgaaaatggcaattggcggaaggagcagcgtgagagcgaaggtaacaaacgcctcttgacgccttgccgccccctgctgtatacccgctgcacatagagcaaaggccgagctgatgatcggttccgccgtgaaatggttgacggacatcgtatctgatctcgtgtgtccgtgtccgagctcgtcgcctagcttgactttgttgccccgcgtacgtccgagccaagaagggcttggcatcgccattggctagagcaaacatcccctaggtcgacctttgaacatatagcaatgccggctagttgaacagctgggcaggtcctgcagcagtactcgcccccgctttctagattgtcctctactttatctgcataactatccaattccgacctctccacgtctcgtcgttctgtgactttgcccgtccgatcgaccatccagaaacgcggaagcgaattcgatagatcccccctcctcgtcgccctcttgctccccacaccacacaccggccaccccgcttgtgactgcctcttatagctgctgccacctcgccatctcaccatacccgtgtctgcatctaccctcttcctgctcggacctgcaaacacatccaacgactcttcgcacagactagtcgtacctatagcaatcttataaatcgtgagtattgtctttccccttcctttctccagcgtactgctgcaccttcgctaccccaatctcatgtaagagcacgtcgctgaaagccccccaaacgtgtacagaccctactcttcctttccaaaccaaaccaatccacacgcgcaaagatgggtaaaagtcaatccaagttggcttcggacgagctcgccgacttgcagaagaacacctactgtgagcatctcctactgctctcctcctctgtgcccgcgacgagcctacctcgaccccaagttctggtgtgctgatacctgctaccacaaatccccgtcctcagtcgataagaaggagctgcaacagtggtacaagggtttcatcaaggattgcccctcgggtcaattgaacaagcaagagtttatcaagatttacaagcaattcttcccctttggcgatcctagccagtttgccgattacgtcttcaacgtgtttgatgaggatcgatcggggacgatcgagttcaaggtcagtcggtcgggtggtggtggtggtggtggtcgtgcgggtagtgagtgcagtcaagctgacgacgtgccgactcgactgtgggaaaaggaattcatctgcgcgctcagtgtcacttcccggggtcgtctggacgagaagctgcagtgtaagccatccgctcgatcgatcgtgcgacgtcgaacgtcttgttcgggatcgacgactgattcgatccgtccgtactgtgtgttggggtgaaaacgcaggggccttccaattgtacgatatcaaccaggatggatacatcacctacgacgagatgttggccatcgtcaggagtatctacaagatgaccggccagatggtcaaactccccgaggacgaggacactcccgaaaaggtcagtcgagtgtcttttccagacacgtttttttttatatcgaaaggaagactgattgatatccctgggatactctccgttcggaacgttgcagcgagtcgacaagttgttccggaagatggacttgaacaaggacgccaagttgaactatgaagagttcaaggagggttccaagcaggatcctaccattgtccaggtgagtaccatgtcgatcgtcgagtgatgacgatgggacggcgggagagctgatcctcgtgtccacgtacttttcaggctttgagtctttacgacggtctcgtataagcttcgacgagggcaacacagtatcctatcgatcggcagtacgaatggcaacaatatcgacaacaacaacaaaggaactcatgctcgaccctgttctcatttctcatcccccccacatacctatttttgtttacccggaaaatccatcccggcctgttcatcgacttttctttttgcctgtatcgcggtgtctgctagagcgggtctcctctcgtacattcgtaggagatccagtcggtagtctcgcgataggctgtataccctgtctctcgatgaacatcaatgcatttattgtccccatctctcatttgcaaatgattacttgcaaggctagagctaatcggatggctggaattgctagaatcgtaaatgacacgtcaaaatcttaatcattgttatgtgactattcctgactttgtttgacaacgcgattcctctggctgtagagtgtcaacgagcgacttctagattattccactgaacactggaaacgagttgaattgaaatgtcaggctcgctcgtggatcaccttgcacggtcaccccggtcactttgcatccgctcatcccatccttccctaagctcgtcgtctcctagctcctagcgggttctcgctcgaatatccagaactttccaaaaggtcgacatccgccaacatcatattccttggacctccgcctgaccctgctctctcctttctctctcaacaaaaggataacgtctatccatatatagtgagtctaaattctccatggccgattcgccaccttgcgcacaagagttgaaactgatcaactataatcgtcttgcctcttctcttgcctttcctgccctttgccccgccccaacgcttcctcggtgccacctcaatctcgaatccgaatctaaataacgaacctatacgacctcgatcagccaacccctgacgtctttacgaaccccacaaataaagcaaacaaatagaataaaaaatgtctgcgcaaaccgagacctttgggtgagttgcgtgaaccgggcgtcatcgtagtgacagctcactgacgacaatgaaacccgtccgatactttatcggcgtgatacagcttccaggccgagatcagccagttgatggacttgatcatcaacaccttttactcgaacaaggaaatcttcttgcgagagttgatcgtgagtgtctcgcgcgacgtgtaccccccacttcccacccgttggtcgtgcaggctaacctgacattgctcgtgatgaccagtccaactcgtctgatgctctcgacaaggtccgataccagtcgctcaccgacaagtctgtcctcgacagcgagaacgagctctacatccgaatcacccccgacaaggagaacaagtgcttgaccatccgagacactggtatcggtatgaccaaggctgacctcgtcaacaacttgggaacaatcgccaagtccggaaccaaggctttcatggaggccttgagcagcggtgctgatatcagcatgatcggtcaattcggtgtcggtttctattcgtcctacctcgtcgccgaaaaggtccaggtcaccaccaagcacaacgacgacgagcagtacgtttgggagtcggctgccggtggtactttcaccatcaccgccgataccgagggtgctcccttgggccgaggtaccgagatgaagttgttcctcaaggaggaccagctcgactacctcgaggagaagaagatcaaggagattgtcaagaagcacgtgagtacaaggtcgtggtcgacacgtggtagagggaacacgagcttactctcatctcttttgacgacctgtagtccgagttcatttcttaccccatccagctcgtcgtcaccaaggaggtcgagaaggaggtcgaggacgagtccgaggaggtcaaggacgacgccgacaagtctgccaagatcgaggaggttgacgacgaggagaagcccaagaagaccaagaaggtcaaggagacccaggtcgagaacgaggagctcaacaggaccaagcccctctggacccgaaacccccaggacgtcacctcggaggagtacggtgccttctacaagagcttgagcaacgactgggaggaccacctcgccgtcaagcacttttccgtcgagggtcagctcgagttcaaggccatcttgtacatccccaagagggctccctttgacttgttcgagaccaagaagaagaggaacaacatcaagctttacgtccgacgagtcttcatcatggacgactgcgaggacctcattcccgagtacctcaactttgtcaagggtatcgtcgactctgaggaccttcccctcaacatttcgcgtgagactctccagcagaacaagatcttgaaggtcatccgaaaggtaagccggcaatgccagaggcaaactcggacgtctcgatcgcctaactgacgctcctcgtcccgtttatccccacagaacattgtcaagaagaccctcgacatgatctccgagatcgccgaggacaaggacaactttaccaagttctacgaggctttcggcaagaacctcaagctcggaattcacgaggacgccactcaccgagccaagctcgccgagttcttgcgattcaactctaccaagtctttggaggagatgacctcgctcaacgactacattacccgtatgcccgagcaccagaaggccatctactacttgaccggagagagcttgaacgccgtcaagaactcgcccttcctcgaggtcttgaagaagaagggtctcgagggtgagtcctgacgggacatgacgacaagttgacaagacgtgatgctgatttattttgcgccacgaattcgcagtccttctcttgtgcgaccccatcgacgagtacgccgtccagcagctcaagacctttggcgacaagcagttgcccctcgtctgcgtctccaaggagggactcgagttgcccgagaccgacgaggagaaggccgagagggagcagaccaccaaggattacgagggtctctgcaccaacatgaaggaggtcctcggagacaaggtcgagaaggtcatcctctcgaaccgtgtcgtcgactcgccctgtgtcctcgtcactggtcagttcggatggagcagcaacatggagcgaatcatgaaggctcaggtgagtgccccgcgcgcatcgagatcgaaatatgacccgtgcgtgctcttggctaaacgtttcgcctcccgattcattctcacaggccctccgtgactcgagcatgcaaaactacatgagctcccgacgaaccttggagatcaacgccaagcaccccatcatcaaggagttggccaaccgatacaaggaggacgcctcggacaagactgtcaagaacttgatcgtcttgttgtacgagaccaccttgttgacctctggattcaccttggaggagcccgcctcgttcgccgagcgaatcaaccagatgatctcgttgggtctctcgatcgatgccgacgtccccgctgccgaggagtctgctcccgccgccgaggacgtcgccgaggtcgacgactctaccaagaggatggaggagctcgactagagcggtcgcgcgccgtgcgtctgttttgaggactcttagaggaaaacgtgtggtagtctcccccccccccaaccgcaccagccaggtctttacggatgataagagaatgacttgcttgtttgatctctttcgtcaatttgcatatgctctttgtagaagataatgaatgcttgaactgtcccgagctgtgtcgcaagtcggaggtcgatgccgtgtagagtgacctttgaccaagaggtactcccctcgtttggctgggctgtgtgcagatgtgaagatggtccacacacggcaggatgatcggggaacttcgtcatcctcgcgtggcaccgcaccctgtgtgtgtggctgttctctgccgctcgccccacgggtttccattgatcgcctcggtcctacgccgcgcggtggcgttgagctcggactcgtcgtagcgaaagttatccaaagtgggaactgatacacccacccacacaacttggcgatccgtcttgcgcagtaattcctcgggctcagcatcagcgatgatggcactcgtattcactctcactctcgcaactcgtcgaacttgactacctctccacctgtgcaagatataaagacacttctcaatctgcgaagtgaaacaatccatctgccgagcttgaaagtttccctccccgcagcttgcatatatacccgaccctacgctcgatctcataatctcaacctagtcagctacctctcaaaatgctcttctccaaaaagaccgccgtcgccgccaccgttgctctccttggaggtagcgccaatgcccagttgggagagtgagtggctgggacaatcgaggcaaagagaggtctcttggagctgactggattcatcgcgctcgttcgttcttgcttacgatttttgcagcttgaacctctctgggtgagcgagcgagctagacagacgtacatggagtttaaaggctgacaatctcgcgggatcgtctcagttcttgtcgaggttccgcgctcagcttggtcattggacctttgaactcgtgtttgagccttaccagccttgtcagcgtgttcactgtgagtcggaaagagtctctttcgagctgcaccttcgagggagacttagtatcgtacgttcttccaacatacaggccagtggttccatcgtcgctcctctggacaactacttgaacaatgacatctgcaacactgatgcttgttcccaggacaccatctcctcggccaaccagaccttgaacgacaactgccaggaggacattcagagcggaagcaccttgatcgtcggattgcagaccatcctcaagcaatactctaccattcgagagatcggatgcttgcaggcttcggggtgagcttgctattccagcgtcagggtcaggctgtgcgaagcggtttcactgacatgggttcatcatgctctgcgcttcacttcgcctcgtatagaaacaacacccgatgcatcacccagtcgctctacggaatccagaacgccaccggtcagaacattgacatcaactttttgactggccttttgggtgtcggtggtggcaacaccagcgtcaccgatttggccactctcgactccaatgtcatctgtaccggatgcaacaaggcgtgagtccacagtctcatcgaaggatgttttcggtatcagcgatggggcgctgactgtcgcaatcatcccgtggtctcatagtatctaccaggtcgcctctgagaacaacaacggtaccttttccggcaacgccgtcggtcgtgccattgaccagaagtgtggatcgaactttgcctgtacgtcgtttacgtcctgcaacgggtacgaatcgacaatccagctgacatgcgtctcgtctcgcctgtagcgtctgctttccccaccgacgtgaccaaccctatcgagcccagctcgaccggatccgccgccagcggtgcctcgagcacccctgctagcacctcgaccggcgcccagaacgctgctggcaaggcttggaccctgaacggattgaccatcgtcgccgccggtgccatgggtctcggtgtcgttggcagcgctttcggcgttctcgcctaagcctagccaggttgcactaccagcaggttccgggatcacctacctacctatacgcggactgggattgacttgccaggaggattacgtgctgctcagctgcaagcataccagatacaagatacatacaggatagaatggtatctctggtaacgaggatgaaaaccactagatcaggataggacgtttgcccgctaggctagaaagtttattgtctgtgtcattatcgccatatagcccttttccccgacatgtatcgacaagataggctcgtgatcgtcatcgattgtttcatccaatccatcgttattggtgtgcacaagtggtagatacaacatccgggaaagatcccgggctcatgtctcgtcgacgggcgtcccgttcagtctcgaaagtttttgatgtggacctcgatcattttgagctgaacccctgagtgggcttgccaaagatcttgttatcctccggtttgcctgttggtgcggtcccgatctgaggaattgtcttttgttcttccccgaggtaggctagcatcaggaagtatggtaggttgagtaacgagctcgagtcatgtgagtcgcggaacggcaaccccgatactactgacctcgtttgtagaggatccagctggtcgctacgaacagggggaacgagatgatgatcgtccgtagacgcttggcgtccgccgttaaaggctgtgatgaaagtctgggcggcatggtcagatcgagtgagccgtgagcgtgaagagaagagacggcagtagaagtgatcctgaggcgaagtcaagagtgtggtcgaggtccatatgatacgaatatgccttagcatggcctgatggtggtctgaaagtggaggtgcgaggaaggaggggcggggggcgacgcgaatttggaaaccgatgatcgtccgccggatctgtgccttactagactcaactgttcacggcaacttgtaagtggcagcgtggtcacaccgttgtctgttgtcattcattcctctataatcttattcgccatccctgtgtgataccagctgagaaaaggttcaagagtgaacaagtcttatatcagcaataccgaccacagtgctattctcacccacgactcttcagcggctcaagcggtgaacgagctctccttttcccccccttcccaacacactatcacgttacggagatttcgcgcggcgtaacctgaaccacctcgaaagcgtgataaatcaaaccgtagccgcacagccatgtcttggaagttgggaaagagtgagcgccctcgtggtcaggactaagctggagcagaggacaaggctgatcgcgttggatctacttcaatagagctcaaggagtctagtttcctaggtggccatcaccactcgtctcacaaggacagctcggccaccatcaccccctcggattcgagatcaactaccccgactccggctgctcaggctcagaacaatgtcccctctcacgtctttgcacagagcaggaccaactcgggtacggcaacccctacctcgtcccagcctccgacggcgaggagcgggttgttgaagatccgcgtgacgagtggaaagagcttgaaactgccagatggaggtcagtggcgatgctgcctggcagtcggttcgaccaggtatcattgcgctgagatcgtaatttacatcgtgttcagtctctgtgcccgaacccattcagagggctctcaacactcacgccctagcggcatccatgtccacctctgccaacgccctcgccatgcaagccaaacgccaatcaggcgtccctagtaacaacagggattcgatacagaggaaacaacagtggtggttgccttacgtcgttttggagtttgacaagaacgaagtcttgatcgacgctctagggggtgacctgtcggctcccgtttggatgtacagcgcgaccttgtgagtcgtcctgtgactcacccttgaggtccaaacccatcaataccaattcggaggctgatggatgtctcgtcgtctcgcttcaacctagcgacgtgtcccgtatctcggacatcagcatcacggcctacctgcggaacgtctcgcccaacgctccggccaaccagggggacgagaacgccaacatgggtaattctgatctttgtctcggaagcgtacgatttacacccaatctggagtcgatggtgagcctgacttgggggtcgagggtttcgcacgagccagccgctgatccggcggggacttggtagcaacctgtggacgagtggctgcagttgtctccaggaaacggcgccattcacatgcaaatggccttcaagcccaaccaggtaggtcgaggttcagcgagccagagaaggaggcctctgaaagctgaatcacgcttcgcagaaccaacacttgaccatcgattcgttcgaattgctcaaggtgatcggaaagggaagctttggaaaggtcagtgcagcccacatgtgtttccatcctgaatccgcctgatcgcacccaatgcctatccaacaggtcatgcaagtccgaaagcgagacacgctgcgaatctacgccttgaagaccatccggaaatcgcacatcgtagctcgatccgaggttacccatacgctcgccgaacggacggttctagccaaggtcaacaatccgttcatcgtacccctcaagttctccttccaatctcccgaaaaactctacctcgtcttggcctttgtcaacggtggagagctgtttcatcacttgcagagggaaggaaagttcaacgagttgaggagcaggttttacgcggcagagctcttgtgcgctttggagcacttgcacagcttcaacgtcatctaccggtgagtatgggcacacacgaatcgatatccaggtggatctgggctgaccaggattgctcgtccctggtgccagtgacttgaaacccgagaacatcctcctcgattatactgggcatatcgctctatgtgatttcggattgtgcaagttgaacatgtctgaaaaggatactaccaacagtgagtagtaattccctgtcgggactacaagattcttgacttatatgctctctcttccgtttgatagcgttctgtggaacgccggagtagtaagcagtcgtaacgtcccgctaccgtgatagtcccgaactgacaaacacggcgcttcacgtagcttggcacctgaactactctccggccacgggtacaccaaatgtgtcgattggtggactttgggagtgctgttgtacgagatggtgagattcgaattgcacgtcttcgcttgagatccgtttgcctaatcatcctgtgtattcgcagttgaccggactgccgcccttctatgatgaaaacaccaacgagatgtaccgcaagatccttcaagacccgcttagattccccgaagaggtcggctcggacgccaggtcgttgctcaccaagctactgaaccgagatcctgctcaacgtttgggtgtcaacggagcccaagagattaaggatcaccctttctttgcaaagcacatcgattggaagaggttgttggctaaaaagatccagccgccgttcaaacccgcagtcgtaagtcgaacgattcggccattcgacgcgagacatactcgtggttaacttgtcctcacactgcaggcgagcgccattgatacctcgaatttcgattcgtaagtcccttcgctgaccgcgtggccagacacagtgctgatcacgtttggttttcattttacagcgaattcactgccgagccgcccgtcgattccgtcgtgccagactctgcgctctcccagaccgtacagcaacaattgttcgtgcccttacatctcgtcttcgctcgacaccatggctgattcaccgtttgccccaacagtgccggcttctcgtggagcgaatctcctatgggccaatcgtaccgatagatcggtctcctctcacctttatcattctatcagtgcagctgtctgatcgagaccgctatcagagatcacagagacttgcttgtatgaccccgctgggtgcctcgactagcgatgtaaattctataccatgacccgactgactggttcggttcggctgatgccctgacatttcgatcactttgtatgatggggattccatctcacgttatttgatagatgtcaggcgcgcgatcatcctcgagccagcgccatgacgacgctgagcccaccgagatcgttgatgagccaaagaggtcatcatcgcagtgtcttcgctgtctcgcatcactacgaccccacataccgacacagtcatccctcataaatcatctaatatggctatctcggacggtgaacttttcggcatcaatgcggtacgtgcggttgatcgacgtttgcgtccctttcaggcgtcttcgtacgtgaatgatggcgggtctgaactgatctctgtcttgttctgttttacaggctgccgcacagcagaagtatggtgtcaagcctaagcttggtgagttgtcctcagatgcacgaagctctgcgtaccctgtgacctaacttcgatctcgctgtagattaccaaactgtcagcgccgtcaacgggtgagtcgatactgtggattccgtcggcctttcgatcaagttggagctgacaggcatcctgttcccgaagacctctggtcgtcttggacaacgtcaaggtaagcaaagacaaaagttagcttgaagtccaagcctccgtgctgaccaaacgagccgatctctcttagttcccttcctacaatgagattgtccagcttaccttgccggatggaaccgtaagaggaggacaggttctcgaagttagcggtaccaaggccattgtccaggtaagatcagtccaggattgtctagcttttcttcatctgacctcacaaacgtgcggtaattcaggtcttcgagggtacttccggagtcgacaccaagggtgagcaaccgtgggaatacctcttgacgaacgtgccgctgattgttgttatgccactatcagctacccgagttagcttcagcggaaatgccatgaagctcggagtcagtgaagacatgcagggacgtatcttcaacggttccggtcaacccatcgacaagggacccgccgtctgggccgaggattacctcgacatcaacggatctcctatcaaccccttctctcgaatctaccccgaagagatgatccagactggtatctcgacaatcgacaccatgaactcgatcgctcgtggacaaaaggtcagtaacgtaacggggcacctggcaatcgggtttcggtccctcgctaacgaatggatgtcgtgcaatcaggtgcccattttcagtgcttccggtcttcctcacaacgaggtaagtccctctacaaccgcggtgctattgaatccttgagagcatacacactaactggatatgatcttccgacatcagatcgccgcccagatctgtcgtcaggccggtctcgtcaaccgacccggtgccaaggtcgaccgccccggtgccaccaagggtgtccacgacggacacgccgacaacttctccatcgtcttcggagccatgggtgtcaacatggagactgctcgattcttcaagcaggactttgaggagaacggtagtctggaccgagtcaccttgttcatgaacttggccaacgaccctacgtaagtcgcggtcgaagccaaactcggcggcatcatattgatatgagccggccaatccacagcattgagcgtatcattacgccccgtttggctttgaccactgccgagtacttcgcttatcaactggagaagcacgtcttggtcatcttgaccgacatgtcgtcttatgccgacgctttgcgagaggtgagcacctttgcgcttggcccgctatacctggtctttgtctcattcgtcgcaatttttaggtctcggccgctcgagaggaagtgcccggtcgacgaggttaccctggttacctgtataccgatttgtctaccatctacgagcgagctggacgagtcgagggcaggaacggatcgatcactcagatccccatcttgaccatgcctaacgatggtaagctaatgcgggatcggtttgctatagaagagaacttctacttacagtgcgactcccacagacatcactcatcctattcccgatttgaccggatacattgttcgtcgcgctcatgttcagatctgcaaggatcccaactgacctgacctgctcattctatctggatagacggagggacagatcttcatcgaccgtcagctcgacaacaggcagatctaccctcctatcaacgtgttgccttctttgtctcgattgatgaagagtgccatcggtgagaagttgaccaggaaggatcacggtgacgtctccaaccagctggtcagttcaccctgcaagaaccatccttgactatcttctgacatgcgtcgtgcttgacccgaatagtacgccaagtacgccaccggaaaagatgctgcctcgatgaaggccgtcgtcggagaggaagctttgtctgctgaagacaagctctccctcgagttcttggaccgattcgagcgcgaattcgttgctcaaggtgcgcttaatattctcgatctcgctctctggtatggacgctaaccgctctcattcgcgtcgaccaggtccttacgagtcgcgaaccatctttgagagcttggacctcgcctgggacctcctccgaatcttccccaaggagcagctcaaccgtgtcaaccccaaggtgagatcacagctctgactttcgatacgggatgcgatcagccctgacaccacttgcatcgcagatcgtcgccgagttctatcaacgtaaagccaagcagcagagcgacaagaaggaggacaagaagcaggatgacaaggcggatgacaagctcatcgacgcatagatctagatattgttttctctcgcgatgtatacctcttgctgcttgttttgttctgttcttaccatgccggatgacaccttttgtagacccaaatgtttggccatgatggtctggccttacccgcacccgggatcatgacgtcagtcttcccgacgcgtttcaccgttggtcgttgccatcaatctgtcccggccgggggaagccgagggaaccaccgatcgattgtgatgcgatggtcatggaactcatcccaaatcacagacttgctgtccctggatcctgccaggttgacaaggtttgcttcgataattcttctaacgtaaaggcagaatacacaacaagcataacaactcgaacaaggggcagctgcgaagagtgatctcgctttccctaatgccacaacgcaagcgaaagacctccggaatgggaagcgatgacggctcacacaaaccaacgaaagtccgcttccgaccgacagcagactcagtcgtactcccttcagatccggatacactctccgagactgatatgacagagaacgaatggctgcagggcgcggacatccgggtgggtttactggtggcgaacagaaatgcaacatcgatgccgactgcgtcttcgcatagacactttccgtcaactgccacaagcagaaggtcgcagcagcctatcatgataacgccacacagactttatcattgttggaagatacggaagactccccttcttttgatttgaccatgacctgtaagccaacaagaccggctaaacacgggagctaggctgacttcctcgaagtgctcgagcaattgaatccctctttgatcctcgtcaatgctggagcgcatgagactctcttggatgatctagtggcatactgtaaggaactcatgaccgttcttgctggtcgagccttgctctctcagataccagtcgttgctcgctatccaggcgacgaacacgacgatatcacggttcggatctgtgcatcaagagacttctacatcaacgcctctcttaatcggttggcgagcgtccacattctccgaaccactccgattgcaaggactttcacaacagcagaatacatcaatgaggagtcgagtcaggttggatccgcttcatccggaggcttcgtgcgcccagacccggcttccgcttacaacaccatgccgcaaggcgaaatcggttgcaaagagatactgaatcggctcgggtgctttacttctctagaagcatacatggcggtcagtccattgatatgacagtgctcagctgtcttgactccctctctcgattctattgtacagttgggagcaggaggggctttattgatacacctggagcgagcaaaggcctctcgtgatgatcacggaccaatcgtgtttcgcaacgtgcaagctctagcgacgtgagtgcgtgaaccgggcgacgataagacaactgctgatgcgacattgcagtcagctacatatgcaaatcaacgccgatgcgttatcgtaggtggatctcctttttagtaacatatctagccactgaggatcatctttccctgcgtagggccctctcgatattaccgatgggctctattaatggcaggagctccagtaaacatgatcaagaattgtccctgtttggtaagtaaagtcgacggagcaagatgggtttcgggactaatctgagatttacagacatcctcaacaagtgccgtacaggactaggagcacaaacgatgagaagatggatgctacgaccattggtctctttgtctcatctcgctgagagacatcaagcagtcgaggtcttggtccgtcctgagaaccgagagattacgaaatcgatccgggactacatgaaggctatcaagaatattcattacgtgtttagtcaactgaattcgggagacatgagcgcctggatgccttggaggaatcttgctgatgtgagtcgggagttcagcgaatttgggagaagcatcgctcagctctgcttcgaagctactacggggtgctatcgacatagtcgagtcgatgaccaatcttagaggatggaattcggttgatctgtgtcgaaaagttagtccgcgtgattccggcgaaacatggccgtgcggctcattgggcgaccagatacaatcggtctcgaagagaaggcaattgcaggcgctccttgcattcgttacagagagggtgcgctatcccatccgcacacgtcggatagtttgatagaacctggacgtcaggtcgatatcgacacctcacgccacgagggccggatcgtggcatgtcaaggttacgacgatacgctggacgaactgaacagccgtttggaaggtatgtcagaccgatactcaagtcccgacgtcggctgactgagtcaggcacaagtgattgcaggactggaatcggttttagtaggtcccacagacgatatgcacgaggagccgagagttaaccaaggcggatatcaaggaccgaatggcagagatcacgaaggaggaggtcgctggaaatttgccagccgatatcaaagtcgtcatgtttccgcagcttggatatctggtcgagatcgtcatgcgtccagaggaagccaaagaagtacctttggattaccaggtaagatgacgagaataaaggctgggatggaagccgcttctctctgagctgcggcgtcctgcggatttgcagttttcgagcgaaacaagctgtttcttcaaggtacgatcgaatatataccttcagttcatcatcgtatctccaaacggtcattggttacacagtccgccagaatgcaagagcttgataacagcttcggagacatttacaacgaaatcagtggcaagtagatatatctttggctgggtcaatgccccaactttaactatgagtatgaatgccgttgttacagaccgcacgattgaactgctggaggtggtactagaagaggtatcaaaaagcgccccgtcactgttagagattgcggaactactgtctgaacttgattggtaggcagaacgactgccagaatgcgcggatacaagctttgaagtgcgttgattcattccctttcatgatagcttgatgtcattcgccgaagtctctgtcgaatctcaattggtccggccggagatgcttcaagaagcgggtattgaaattgaggaaggaagacatgtcctctacgaaatggtgacagaaaactatgtcagcaacaatacctcgttgaaaatccgaccgaatgagaccgctgcttccgatgaagcagacaaagaagagtctccaagtgtggtgagcgcgttaccgtttcaagaacgcgagagattcgagctgatcctcaaacacagatgatgatcacgggcgcaaacggtaggtttgggaatctaactagagcaagcgcttagactgatgcaagccattgtttctctaggttccggcaagagcgcatacgctaaacaggtaacctgacactcagatatcgacagttagaagcgcctactgattgcggactccctcaggtcgcaatgatcgtgtacatggctcagataggctggtgaacaaagaaaccagctgccgactcccgtctgagcatttcttctgattcgatttccagtttcgtgccagcgcgctctgcaaaactgggcgtagtggacaagcgtaagtaaggctagggtcgagtatatagtcactgcagtactgaagaccggtagtgtagtgtacacacgcatccaaacgaaggagtctgcgctcagggtcagtgtcgcaatcgggatcgtcgccgcacacatgttcatcactacctagtttgcagtccggatccgctttcatgatagacctgggtcaggtttccatggcgcttcggggcgcgacttcgcgttcgcttctcatcatcgacgaatttggcaaaggtgagtccatgcgtctgatcactggcttcgaacgttctaggccaagctgatgtaaccgctggatgcaggtaccaatccgcaagatggggcaggcttattagccggattgacgaagacactcctgaagcgaggcttggattgcccaaaagcggtacgtgtacttgacgcgctcatgagtgtagcgatgcattgatgcccgattcggcagatcattgtgacgcacttccagtaaggaacgatattcgggaggagcggggttcggggctcaacgtgccctctttcccttcatagcgacttggaggagatggaagacgatggtctcctgaagatgcacatgaagagcgtgtttcaagagaatggcgaggggacggggaccggggagattttattcatctacaggtacgtcgcctcctaggcggtacgcgcgtccgcgctggctcaaccgtagtcattgtttgaaaagtctgcagccacacacttcgcagtcttccaacgccgcggaatgtgccctgcagtatggattatcagaggagatcgtcaatagagctcgcgtagtcacgtcagtaatcagtaccgcggaacgtgagccgatatcggaccctgatggttgcgattctccgccgcagagaccacttgaagagctttgagctaggcaagatctcggacgtcgccatgtcggatgcagatctaaaagagctaagtcaagcggaagagctcgcaaagttattcctcaaatggaagccactcgaggacgggggcgctatggaggatgggccgtgcgaggccaagacagttctttgccagatgatcgattcgatcggaaaagccgagtgagactgaaacggtaagagcgttgttgaggacacggaaggcgtcgcgtatataaagtgtgtcacgctcggttcgcggagatttttgttcaattcatgtccgttcgggtctttcaaaagataattgctcgtgctgggaccctggtcatctcggttggattcaaagacatctccgagctggctcgcatccctgcagaacactcgtgctgaacttgacatcagaacactctcgccattggaccagatagcgaggtagaataaaacacaacccggcaaactagacgacagccggcacctcaccccctgcaacaaacctatacgcagctctccaattcaataatgtctggccgaggtggattccgtggtggtagccgaggaggattcggtggaggtggtggtgaccgtggtggacgaggaggtttcagccgaggaggaggtgagatcttgagactgctatggctgggcggtccgagccgggtgactaaaatgagttattcttcgcaggtggtgctcgtggaggtggccgtggaggtggtcgtggaggctacggtggctttgctccccagggaccccctgataccgttctcggtacgtctcagtctccacacgacaaagcatttacgcaatcgattgacatggatacgataaaatagagatgggatctttccagcactccgtcgagggagagatgctctgttcctctttgatgcccacccgagtcccctacttcaacgctcctatctacctgcaaaacaagactcaaattggtgcgtattctcgttatgacgagtaacaaggattgcaaaccaaacagttgggattttcgttcaaacaggcaaggtcgacgagatcctcggacctatcaacgaggtctacttcaccgtcaagatgcaggagggtatgctctcgacatcgttcaagaaggacgacaaggtctacattggaggagacaagctcttgcccatcgagaggttcttgcccaagccaaaagctcccgctgccaagggtgacagtgcgcaccttgcggaattagttatctggtcatggtcgaaactgaccacccttatcaaatcacagagaagaagaggggtggagccgtcggtggcggtcgaggtgcccctcgcggtggtatgcgaggtggacgaggttagtcgtgtgggcgcttggaatcgcaaggatgcggcaaactgacggcactttatcctcgttcacaattcaaaggtggtgcccgtggaggtgctcgaggtggcttcggaggtggtggtttcagcggtggtcgaggtggattcggcggcggtcgaggtgcccctcgaggaggtggcttcagcggtggacgaggcggatcccgaggaggcttcggtggccgaggcaggggccagtgagcgtagcacaaggtgtacttgtttctctttcgaccggctcgtttttgtgtcttctctctccgtccctcgcgctgcatcgcggttgcgtgggacgtgtacgatattcatacataaaaaacgcccttcagccgatcgttgcgctcggcagtaccatgttgccagaagccgtgccgtccaaagtgtcgcagaaacgggaaattgatctcgactcgggctgcctaggcatctgcgcggaagccgctcgtcagatactttgtataaagagggtcccatcgttggaatgtacgaacaccaaacaccgtcagcaaagctatcgtccaagcatagcatatcggccgagtcgcgatcgacataataattataagcgcaaatcaagccattaaacgaaagcacaatgtcagattctagcatctactttccgctgccctttcggccgatgctgctcaggaagaacctggacccgctcttgggaatagcctcatcgctcccgctcctgctgtccgttccgactttcatcctcgacattgaaattttgatacctgcgtctggctgcacgccatcggatcgtcctcgaggagccttgtccttctcctgctctttcccgccggatccggatccggaacccgagctgacctcctgactatgactcggaccacgctgtggaatcgttagactgagcgcagcagtctcatcccagtacatggtctggcttcgtttcatcttgccattcccgttgagtccaccgggcgcgagattcggccgctgcatgctggatcggtttccgccagtgtgctgcgatactagctcgtcgatcgggagcatcgcctttgtcgctcttctaggtgaattagatcgattgaacgactgtaaagcgggcatcatcggcggtgtattcataggtgggtatatctgcatcgtcgggtagggcatctgcggctgcgtcggcatttgcagaactggcgggatttggcaatctcggtcgactagcatctgaaacaccagcatcatgtaaaacgcagcgtttccagagttggagatggggatgtgcggcggcgtcggtatggcaagttggtggagcatccctcgcaggctgagcggcgcggaattggccagatcctggtgcgacgcttgctggaccatggaagcgcggtacagagacctttctagattggaaacgtcgatgaacgagacgttcgagggtatatggacgtttttcaaatctgaaagacgggaagagtctccgatggtaaggatgacgagagggttcaggccgtcgccctcaggctccgcgagagccgagatcgtcgcactgcggccccgaagcggatcagctttctcgcgactagcttcaaagcaaggtcgaatgtacacccacttgatgatcttttcgagtgcagtcatgctgaccaattgtgttggtccatgagcgaaacttctaggttgactcggcatgtaatggttggtgttcgttcgctataaaggcaggtgtttcgtcaattcaatttagtcacgcaaagtacgcatcagggccaacctaccttgtccagccattccgacacgacatagtgagccctgcggtaattctcatcgggcatcggtggccacgagtcctgcgcaaatgtggcgacagtttcagcatgacggcgcgatttcgctcggaaccgacgcgatgcgactcaccatcgcatctatattccgacatcgacaagcacagatcccagcttccagcatgaccccatttcctttttcccaccaggtgatttcgagagccaaaaagttgtctatccacagcccgtcgttcagtaagtttattctccgaatgaccgcaaccgagccggtcaccatatgcactcacgcatcctctttctccagatcgtcccgacggtagcaacatccccagctctcagccgtttcctctttgcgttcagctctgcactggggatcgtcgcggccagccgtttgtacgaattgagatcggtgaccagcctgatggcacgagggttgctttccgaaggggtgatcggtagctagcgtgaattccagatgatcagggtcccgtagcacgaagaaacgatggcatatgagacaaggacctacctggttaggcagctttggtagcgattctccaaacctggaaacccgacaacgatggtatatgagatgatccatctcacaccgaccgcgaacgtctggacgagcgtcctcgagacacacctgactttgaccatcctcgcaaactgctgtaccgtccccccctctttgcccgtccctgctacagcactcccactaccaccgcccccgcccaccccggcgctggcattcgacccttcggctcggacggccacatgtccctttcccgtcctcgagtcggtgacgacgacgcatccccagccgaaagacaggaaagcgtcgaacgaggtgaagaatggcgaatacgagtggttgtacctggatgatccgtcattcgtaccaaaggtgggtaatgggtgtatgtgcatgtgagtcttaagtgtgagtgatcccgatcgggttcgagcgtccgtgctcaccaagcgatccctttccgttcaaagtagcccataaagctcgcatagacatcatggagatcatgcgtatgatggcgcggcgagacgaggatggtatctgacatcctcggctggatgaccgatcgaggttcgtcgggcctgttttcgggggttcgctcttgtctgatgagctcgtgatttgatccagtcaaaggtggaacgctgctttatctcgtctcgtcggaccgtgatcaaggaagccgatcgtttcaggggtagtaaagaggagcgcctctgtgtccgggtcgtacacgtcgagatcgaatgttcctgtgctgtcttcctgatctcgagcgaaatggcgacgacgaaagtgattgaccgatcgtcctctttcgagacttgcgtaagccttccgatccggatctagtgagagctcgcttggtatatcgtcttgcggacgtgtgatattcagactctttggtttgacgccagcgagacttgatcgattggatgacagtacactagtgagctactactgatacacctgatgtgtgcgatggttgtgagactcgatggccgcggcgatgcgatgggacgactttgaccgaagaggagccccggacacagcgggacagtcggacgggacggtcccggccaagtcgctcgcttggacgacacgacgttcggctgaggcggtgttgagtcgtagtgaggtgacttttctagctcgacaagtaggaactcgacattaggccagataaatgtagctgttaatgaaccagagtctggaacttgtcgctgaatgtcggtatttatggtcgtcgtataccaaaagatcggtcgatggcggctcaagtcccggaatgcgtagaacaacgactgcacacatacaccaacacgggatcgatttggttccggacacttcttctctgcggctctcagcagctgcgtgacaacctcgaaagttgatttctgttttcctctcgcttttctctgactagcacgatctttagccatatcgtttataccccacgtatttgaccgatagtctgctcatgctgtgtgtactactagtcgcctttacgaatagaaacgactgctgctcagatcgatctaattttgcttccgatcctcttcctcctttccccccttctcccccgcttgtgcatgtgatgacgagctcgcttcttccgtcgcgagggaaccgagaaatacgttgacaacactacttttagagagatctgggcgagtcaacatgcagcaggtgtgtatatcgactcaggtcacatctacggtaatcatcaattagctctacttcctcgacttggcaactcgtactagcacaaaccagtaccgaccaataaccaaggatgtccggccccatcaagtgttccatcctcggagctggtacgccccgcaccccaacacgtcatctgaccgtcactccactcacacctcgacctcgttcccacccccgcaggtctctctttgcaagccttccactatcccttcatcgccacctacccggaactcttcacgcttcactctgtgctcgagcgatcggctaccccgaccaagtcggccgctagggatttcacagggatcaaggggttgaaagtcgtcaacactttggaagaggtcaccggcgacgacgaggtcgagttggtcatcatctcgaccccgaacctgagccactttgattacgccaaacagtgtctcactgcgggcaagcacggtcagtgtgataggacctcaccccgttcgagactcttgtgtttgctcacgcctgtccgccccgcacgctgcgctcgtagtcttgatcgagaaacctctcaccccgactcatgccgaggccgtcgagctcgtcaacttggccaaggagaagaacgtcatcctcgctcccttccagaacagacgatgggatgccgactttttggccgtcaaggggttgttgaaggaggaaaaggtgagtcggtctggtctggtcttctatcccttcctcgctcttttcgaggtcaagcgtagtgcagcaacgtgggtgctgacagctgttcctcgtctctctgacggtagctcggacaattgctggagttcacctcgcacttcaacaggttccgacctcagcctgtccctaacacgtggaaagaggctcctggtcagctgaacgacgccatctataacctgggcagccatcttatcgaccaggcgagtcaaggtcccgagatcttcataaacagtgcaggtcagctaatatctgccgtcaaacgctaggctctggtactcttcggaaagcctgaaaaggtcggaggctggtgttacaaccttcgagcgcccgagggtttggatgattcggtaggccgtgttttcgggcccgaccggcgcgtccgctttgatactgacaagctccgggtattcttttgtcactgttctagttcctcctgcacatgtactacccgcgttcgcaccctctttccaaaccttaccccttgctcgtcactctccaagcgagcatcatctgcccaggatccaagcagttacgataccagatcaagggtaacaaggggttgtacaccaagtacggattggacgtccaagaggctaccctgaggaaggtcgactggaagaccggtcccgccgagggtgttacccctgtgggcaaggagggatggggtgtcgagtccgcggaagcggcaggcgatctcgagctcgtcaaagaggacggaagctgggaggccgtcaagtgagctttaccccccagccagatttctagacaagcgcgatgtgtgctcggaagatcctgatgcatgcttcctttcacgatacagacacgtctcccccgccggagagtatcagactttgtacaagtccctacacgaatcgatccggacgggcaagggccgggacgcactgctggtcaagcctgaagaggccgcgctcgtcatcaaggtcatcgagttgggtatgcgtgcgagcaaggagggcaaggtattggattgggaagagtaggtgtgggatcacatacgcgtgcattctgttgggtgtaaacgcaatagtaaacgagacgtgcgatgtggcttgtcaagggacattgaccccatgcatcgatggcctatattactgtcgtgttgactggtcgggtagggatgatgcactgtaattttccgatcgcatcgattggtaacagaaaagcccgccgattcagccaattcgactctcgcgaacagacgacaccgccacatgaatcgtgttctgtggtaggagttactcgagtgaatgacgcgcccacgtcacttctggtcataccatgggcagccaaaataggtcgcaggggcgcgatagccggcgtgttacttgtgcagttgttttacacctcataatgtcttcgcccgaaaagggcaaccaagtcgatgcgatccgtaatatcgcccgaattgggcaaccagagttgaccaacgacagtgagaccctagaaaccagatgtctcaagcatggaaggatatcccttactccagcaaggccagcaacaacacctgccgtcaagacgcacatgcgttcacgacttcatagtttccgcaagtatcacaccgacgattgatccgtggttggctcggctggccggctggtcgttatcgccctgagaatggaagcgcgaccgccagcccgcatatccacttgacctttgatcccgtcgaaaggaccctttaggcgtgaaacaagtggatcgaaaggacggaccctgtttgctcgaaggacgatcgttcttttccttttacagcgtgagaaacgctgcgagggcgatttgcgggccgtcatatgcgatacgaggggggcaatagatctcgccccagtcgacccatgatcggtaatttacattcttagacgtcctttcgtcacggggcgaaggatcttcttcctcgatttatgagccaccatggcaaacttcttgatcgaacgctggtgagatacacgtcggctcccatctccttccgtgtccagatcacagcgtggatcgcccgtaacgtcccgaaaagaatcaacggagtatcttcggaaagcgtttcgcctgttgatcgaattagcaagggctgcgggctatgcgcaatctcttcgtaggaaatgacacacagcttgctctgaacgtctgtcacagcgcaatgatggcgacactgaccagacgcaatggggtttcatggtctaggtcgcgaaagaaggttgtcactggccactggctactggcttgtgtcgtccacgggaggcgttcctcttgatcagactcgacacgtgaggtgaccgcgcaatcacggagattcgtccgtgtgagaccgttttcgatcaaggatggctctgtcgcctcggtttcttgtgtcgagaaacaagcaagcgatcagacgaccagaccatcattcctcctcctctctctctctctgtcagtccccaaacccccggctgcgaatgggctgatccacctagggtgcgcggcgacagggacgggggaagtaacttcggtgccagacgacgacgacaattgatcccgtcgtcctgatccatcatcattataaacgtcgttgctcgtgatcatttcgatacggtgcggtgcgcaaaggagcgaaacccgtagaaatcgtacccgtgccagcgtgcggatcaaacagtcggattcctgaaagactggaactcaaaacgattccagcgttcattctcgtccaggaatcgagtttgtgcttcgaccgagggatccccttgaggcgtggtcaacgtgggggcgggctatcactggcgtcacgcaccaaaacctatcgcctcgggcatagaatcgcctttaaacgcccgagatttcgatccgaggcagttgagctgggggaccttcctggacatccagagtcgtccgattgaccgagaaattcctctcgatcactctgccaccaagtaaatacacttcgagcttcgattcacactctgcactctactctagcttcgctctcggtccattcgacacgggcccgctgatcaggcatgatcatctcttcgcctacaggtcgttcggcacctagcctgtgcgacattcgcattcccaccagtactagtgcgacccctcacgaccctgcacgaagcgacggctccaggaattcccttccgttcgccgttcgctccaagtgctagcctctatcgccttcagccatcagccttctcggacaaagttctgtctcgtcgacacgcggaagaccaccaacgccggactttttctcaacttcgcttctgaattcccctcccctcctggtgtcggtcgagcgaccggtcgctagtcaagtcgtgttcacaggaaggatcaaattcccgacctcgccattcgaacccccctttggttctaggttacaaccacctccgcggcttcatcaaggggggttaggcaccagcaacggtctgtaacccggggtgacgactgtcgcggcaaccgatcggtcaagccataacgaatacggccatattcgagccgtgtcgctttagcctctttatccagctcatttcggacaacgaaatacatcgatatcgccgagctcggacagcgactagcaccaaggccgatccagctttggcgtgcatcgaaaatcctgcaccccttccacgtcggccaacgaccagagatcgacgtcacaaacttcgagagctccactcatcgcctcatcgacgacgacggatcgttcggtgcctcttgtggatctggaatagcacattctatcacccgaacaaccgtacaccactatccaaaggccatcgaagaattttagcggtctcctcccgctcttcaaagctcggttcggcgttagacattcaatacgtttcgtgccagccgagtaggaaagccagtttgctcatcactaccatcttccggccagaggattgagaaggtttatcatccgctgttgttcgccggccgacatcatcgtcaaccgagcagaacgtgaagacactatcgctcgtcgggtgttcgagggttcgaagttcaccttcaagtgaaggaaccggacatcgtcaatccaacagccaagggtccaacgcacgatcggcgaagccttcgtaaagagccaggaagatgcagggtggttatgaaaggtcgatcgaccggggcagatcgaactcttcgtcccagcaaggacaaggcccagctcaaggctttcccctggatcgatccatgcgaaccctgcctcagaccgggaccgtaatgggcggcgatggaggtctacgcttggccccaacctcgcaacagcctcccctcgaagttcgaggtccacaacgtcctgtacggcagttggggtaccggcaactgccacctccgcccatcaacttgatgccacacgccatgccaccgtcgacagatatgtatggaggcgggatcgccctaccgcaaggcatgacgccgacaggtccttccatctcttgggccgacggggatgtctgggctcatatgggcgccccgacgacggatttccgtgggaccgtttcgcaagatccatcgctcggcggcctaatcctctccccacaaatgatgtctctaccgcctcaccatccgatgtcggccatgcagtcgcctaggagcaacgtcgcgacgctcacttcgaacgtcctagcccatcggcaagctcccacatcggcgcagagctcgaacggcatgttcggctattcggtcgatttcagcatcaacgatggaatgcaagccggtacgcctcaattttccgccgaccagaggttgccagaggctggacccagctctggccagcccatgatgtcggacatgatgatcaaccgttacgggcaccgagtcagcaacgggtcgattggtgacgggttggcaatgtcgataaacgaccacgacgatacgggcgagatgacgtcgaattggatcgaaggtgacgatgggcgggacggcgacgatatgctgggcggtcaggacgacgagcttgacgacgacgatgacgatggggatacggacggacggccaaggaaaaaagcgcgcaattcgctaagacgagggaccgcttgtgttcggtgccggtccaaaaagttgaagtgtactggggagcggccgatatgctcggtctgcctgcatagcaggaagcccgtcgaatgcgtctatcaaccgatggctaaacgtaaacccaaaacccaccgacttcgctcgaggttgcaagagctggaggaccagattcgtgaaaaggaaaatcgtctcagcaaattggacgacccgttcccagatacacccttgacaactcagtcaaggctcgacgtgatttcggaagagcgagatgccgccgcctcccagacgattccgctcaaagagggaaagactttgtcggatgtccatcaatccagggaatctacccagggtcccggattatatgcgtcgtccaacgtttccaatatgcttagcaatccggggcacatcgcgcggaggaacaccaagtccgacgggctttcgctcgatccaggagtcgcagttccctccgaacctgctcgaggcatggacgagaactcgatccacttcgatacctggtccggccccaaacgctcgatgggctcgaatcagctgaacatcggagctgatgccgtcagtagcaacatggcaatgaaccgcctgtcaaccagtgctagagttcacgctcaaggtctgagtttcggtcctggtactgtgacggttatcccgagtagtcctgtggaatacgccttgtgagtcgatggcagtccacgcgaaacctcgatgcagtgcaactgatggtggctctttcaggatctatgccgtcctgccttacagcttctatttttgcatgcccgtgcatccagctcggttcctggactctctgcttcccgcatcaacacagcggccccatcccgctctgctatatgcgctgtttactgcgagcatttacgtcctcgtaaacaaactcccgccaccgccagaagcgatgtctctgccttcgcgatttccgaaaccggacgattcgatttaccccttgctggccggcctggagagttcgttctacaatcgagcaaggacggagctggatcttggccttcaagcgggtgaccagctggacgatctcaccaaagccagtgtaggcttggcaaagtatctcttgctgaccggcagggtactgcaggctttcatgttgccattcgtccgcttggccatagcgtgcgggcttcaccgcataaatcttccgcagccgaccaaggtgaagagcacgagtgaagacccctctcgcgctaacgcgggtgactcgtactcgagcttgacgctgtcatcttctaccgctaagcaccagaatggtggcctggctcactaccgcccaaagctcgtagtcgtaccgcctgcgcaagacgatgtgtcgctatgggaaaggatcgagacgttttgggccgtgaaagagctagattggggtacgagcttgatgtggggctggtcttgcgggttggcggatagtgagattcaaacggcatggccgaagcggttcgaggcattcacttcggtaagcccccattcccactggcatggaaggcgtcgtgatcttggggcatagcggtgcttggctgattcagtgacctcctgaaagaacgatgtcagtgaccgcgaataccggggggtgtgggacttgatggatgcaaagaagccgccgtcgcgagactcttcggatccccgtgttttggcattgcagtctctgagtctcgtcagcagtgcgaacaggtgagttgcttgatgccaacagcgatgcattgcgacctctcgcacgctggtactcaccaagcgatgattcccatgttatacgtagactctttgatcttcccacccctctctccactttgacgcaacctgtcgatccaaactcgcaacacccctttacgcagtacagtttgaaaaaactgcaacgggctttggagactttccgatccagcctcccggaccttgacaatcttcctgacaccatctcgtccgatccttggtgggtgttcactcgagccaatgtggctgcagcggacatgctcttttacgccgagtcggctgtctatcagccggccatgtatgaacacgccgtgagcgccgcgaggaggatggtcgagctgatacgtgggatcccagtggatctctacgcacatctgagtaggtcctttccccctgctgaacgccgccccgacaggatgttgtgacattgacggttttgcttgctttgtcgcgtcgtccttcctcattctgcctctgaccgactccgggtcgatgcgtgcttcatactgttgaaactccgtacccgttgttcgatcgtcttatcctcggtttccgatgctatcgcgtccgaactattgtgtcctctgcggtgaatcggacctcgcacacgcagattgctttgtctttctcgacgtctcgttggtggcccggttcctataccgcgaggccgctaggttaagacatacgagctcgaaccccttggccgcgcagaccgcaatggcagacgctgatacgttgcttgaagctctagaggagaaggcgggcaagtggcatcctttcgggttgtatctggcggaagatattcgacgggtcaagcagggccatcgagagcgcccagagttgtacgaaagggctttgtagtcgataggaccgtgtgccatgtaccatgcatgattacgttgggatatgctatcctggtacgctttggtcatgtgcttgttgaagtgtgaagacgcggacgatggagctaggtaaagactggatcgtcgagacgagtccttattcacagctctcgcctatgcgtatgtggagatcgagtgtatcatccctctcccttcttacgggtgctgccatgagtgcgtcggtcaggtagtccatgccaatgcggtactttgcgggttggattacgtggatggccattttgaatgccctgcgttacgtggatcgaaaggcaggtgttccagctgtccagtgaataaagccgacggttccgggtacgggatgaatatggtatatctcttgatctctgtagaatggaagctggtggctgtacggactattgcggtgaggatctcattcgatcatgtactaaagagatacaaacatgcgttccgaatcgagaaaggggcagacaagagaagtggatgtagtctgcgatgtgagggcgtaggcatagtagctccacgagtctacaagtagcaagagatacgaggttaaccaacccaccggccgagcatatgcggcgctggcctagcgggagagattccagaccgatttccggatcgaaaggcagccgaggagggggaggggatagggcccccccccccccccccccgcgtgatctaaaaaactgaatccgtcaactcgccctcgatagaatcaacaagaccagctcgatccctcacgcaggacggggcgagcttacgggcgccgtgggaatgcaagtaacgggtctcggactcgcaagaggattgcttggtcggggaggtaggcgaagggagaggaaggagggcaaggtgttgttgcctctgtaggccggaagttaccccacactcatgactatgagcattcagcattgcccaatagaagaaagcctcgctcatcccaaattcgttacatggctcgtggtgtaccaccggggccgaggcgaaactccgagatgatctattcgtcgcagacagaaaatagcgcgactccattgtggcaagagtgttgaccccaaggtatcagctccctcgaggtcgcaaagggcatatcatattgaggatgaagaggatcttgaaagacagcgaagcggccgatatctgatggtgtattctatgtgaagccattgcacgacaaagctgggaatttgctcaataatttcgagtcgaggcaactccgcgaaacacgaaagctgatcagataatctctttagccgcccgatactagtggccgttagccaacctggacctttgccgcatcactggtggggatcagggcatcgcctcgagctagcgcttcaggatctttgatcgagttagtctatgccccgtaatgggtgaaatcgcgtagcattcccaaagggaaagcgctcgagcacctgagctctaacacacggatctacacgaagggttgttcccgaggaaggtcgataccggaattatacatccggagacatcggaagcataaagttcgaagggaatgttctcaactatctccccgtgacgaatctgcctcggtcaggcaggtcgtaaatgacgggagatcagcttgtcctgccgtatgtagtctttaccacggggaacttggctgggagcatcatctttagtactgaaaggctctgtccacggctcgatggattctgcagctcgtcagcgagcggtcaagctcatacaagactaccacggcacgtcttcgttaatttggggctcgaatgaacgtcgtggctgatatgtcctcgtggccatcgatgcagaccatgtggagcagtatgacgtggaacacgaacggataggtctagatgacggcctggccatgctgaaggtcctgatggaggctaggccaaggttaatcaaggggatggccggactggcaggtaggcttagcttttgtcgaccgtcagctcgctttactgaccttcgtatcggtattatcattgtctagatgatgtcgaagatccggaactcacttccagagaatcgagcgggtcaaagtttagattctgggaccgacaaggcctttcgagcgttcttcaagggcaggacgtctcgatcgctgtcacgcccaacgggttggtcgaagacgaagttgcaatctgtactcaaatgcaaaggaagctgactttattaatcggacgtctgctagcctcgcagactcggtacaatatgacgagaagacgaaggaggagtatttcgcgatgcccttgacactggagatgacgatagacgagctgtttgacaaactaggtaggcatcccgcccactgcacatccgccctcgccatttgactggaccttgttgagcagacgacccgaatgataccgaagtgtactacctccagtctcagaatggcaacgtgtgggatcggttcaaggaggagtcggatgacccgcccgagctcagcaagtttcagcaatatatcctgcgtgggcctcgggtgatgcaaaagttgggtcagtccgtcggactgggtacagctgattgatgccctgagcgctgatcgtcccacgatctgacacttcaaggccgggagcccgatgcggtcaacctttgggtggggacgagcaagagcacgactaccttgcataaaggtacgtttgctcggcgatgacggcgaggatcgccttgacgacaacaggtcgctctcggtagatccatacgacaatctctatcaagtcctgagcggatcaaagaccttcaccttgctgagtccgattgaagggttcctactggatcgtgagcatggtgatgcacagcatactatctgaccggaattgagccatttactcgacgttcctaacatacagcacagttttacgtgactgcaacgtacggtcgggttctggacgggagtctgcaaatgacgctccacccaggcaatcccagagttccatggacgacgatcgatcccacctcgttgacaccgagcgaagaccaaccgttgaggcctatcactatcacagtgcgagagggcgaatggttgtacctccctgcacactggtggcatcacgtccagcaggccgaggggaatgaagggatatgcgtggcggtcaatcagtgagtgtggaatgcggattgggtgacgagctatgcgtttcgtagaagcccggcttgccagctcgttgggctcgggctcgggtctgtcttttggttcggaagcgaggtcccatcttccccggatctttcgctcgctccacgttacctcgtctaccccaggaatgccttactaggggcgggcatggggtggatagtagcgcggacagagaaaacaaatgtctcgacctcgctttcgcttcgcttaaccgaatattgaagttggtctcgtgagctattttcatttcgctgacggtgactttcgggtggggttggtatacccgctctctttccttcgcgcgctgcttgtagctggtatgacgccccctttcaacccgacgtttacgcgatggagcagttcatcctgaaaagcctcggccgcggggatctggcggttccggacgacgacgatgatgacgaacctgacgaggaggactggggtagtcagagcacgatgagttacgttcgattgccgtgttgaaatctgtctagagagatagagttgtaagaggaaaaaggatgtttcgctatctctaatctctgtgcgagatgcagggtgcgggatcactagaggtttatccttatcctcctcgtgtttgatgctcggccccgtccgagttccccggtgtgatgcgagcgattggccacagtccgagtccgagtgagtcgcgagtcgagcgagaaacgggtgtcacacgactcttctctcgctcgcatcgaagatccggcgcgatctcgacgggagtaatcgatccaccttggtcccccctcgccttcctgcactcccggcctcgtgcactcctctcggcgactcactgctccctctgcccttccttcctgtctctctttgctcttgctcttggctccaaactctcgcggccgattacctcgtaacttgttggacatcacactaaccagctaactagctcgacatgctctatccaatcctcgtcctacccaatcgacaactagacagggttgtcactggtcaaactcgccggtggttcagacccacaagtgtcggtacaaccatcgtatataccaccaatccgagcacatagctctttcaccgtcgatcttccttatcgacgtcatgtttcacaccgcaacaaaggactattgaccgacgagatcgtcctcgccagtagatcctcgagacatcgacatcgccctttcaccacataatatctccggaatcgtcgtcagatcacctatctatacaccgattcgacctcgacgtctatatcagcaataactctcgccgacaccagtaacacaccagcagccgcccggaacatgatcgccactcgtccatcgtcgacgaatcgtcgagacatgacgttcatcctcacgtccaatcctgccatacactctcattcggtctcgtctacctcgccaccaccttgcccgccctcgtggatcggtcagatcccgctaccttcgtccaggaaacaaagggggaaccaggtctggaggaacgtctcgcattacgcgccgcgagcgagggagaagagtgtcaaacgggacgactcgtatggcggactggtcggactcggcctgaagccccagtcgggttctctgacgggtaggaacggatcggacaagtctacctttgacgctggatgcgtgaccgtccgccccgtcctctcacctcccgagtcctcctacacgtcatcctcctccatctcgacctcgtcttcctcgctttcatctcccatcgagaactgtgcattcgacctggcttctacagtcagaccgaggggttccttctgggctcaatattctactcggcctttactaccgcattcccgcgggaggtgcaaacctggtcgtcaggtcaggaaatacgacactcccctcccttcaccctattaccttagcgatctggacgacgacgaggacgatgaggccgacgatgcgcttcgagtcaagactcagaaatggttcctcgccccgcctcgactcgaacgagcggcttcagggagcacgatcgtcagacaagcagggggaagcacggacgaagcggtctgcaccgccacccgccgaaatcgaccccgtcggacgacgtgtcgtcctcgcttcaaattgttccccctggaagacgatgtagacgagacgaccgagcatcaacagcacaatcaggagatcctcgcaaggttgtggcgagaaccagaatcgaaggcgacttcggagttgaccgacgctcgagcatgcggtggtcctaagcgagacgcacgccacgggatgactcgcgggcttgacgcgcacgagtggcccttgcggggttcgaacgaggagcacagcgagtttgccgtgcttgagagccatgcggtcagttcgatgccattgtcgaaacaccttcagggggatacggtctgttggagaggaaagcacgcagcgagatatgacgcgatggcgggatatcgccaagaggacgcgtttcattcgttcaagatcatgaccgagtctgagcctgcatcaacgacgagtgaattcgacaccacgggtctcgctgccttttcggttcaactttcactcgtctcggatccatctcgccctgttaaccttggcgctacgtcgagcgaaccgtgcgcgatgccaccccgtcgtcggtctgatggcgatctcttgcgtaaacgcgtcctggagtggaatatggtcctcaatggcaaggtgtccaacgtccgacaacgcggcgacaaggcgccccgtgatccaactcggcgatccagttgtccggccaagttgggcccgaagatttcgacggtcgacgagtcgggcgaagaacgtgagggaacagctcaaggggaaccttacgagcgggaagagtttcagaaccgttgatcaggacgtcgatcaacacagcgcgaattacccatcgccatccatcatacatttcataaagtaataaagaaataaatcatccccacagttgtatttccgaaacaagcacgacgcaaaatgtcacattgtagttcctcagccattctcatcaattgaagtcatccagggatcatgcaccaatcgacggggacgagacgggccgccacgcctcggcattatgtgtggcggattgcggaattgcaaagccatgagcattcaatcaccatcgctacctatgctagacaaatctgttgatcgagctctatagacgctgcgagtcccgccaatgtccctctcgtaaacctgcctagtcgatcttgtcggccttcttcccccgccaatcctcctcgtcgacgtctacatattgatcccgcgtcctcgagctcccaggctcctgacctgaacgcccaatgtcaccctcgagatcgctgtcatcgtcctcgagcgcgaagacgacgttttcgtccttgaggtcgccgtggtctccgccgaggcggattccgcctccgttggctttgccataaggatcgtcgtccttgccgaggaatccctcctgttcctcgtcttcctcgaagtcgtcgtccccgtgctgaacgggtcgaccgccagcgagttcatatccttcgccatcggcctcgtcttcgtcctgcgccaactcttgagacatggcgaaacgcacgttatcacgagactgtgagcagggatcgtcatccagtcagtcgccacacccagccgaataaccaaggattgcggctcacaggtcgccagagccatgcaatagcggtaaatacgccaaggtagatcatggccagggaagcgtccagcaagatccacctgtatttccaatttttgggtgcgtaatctgtcaggcgcaaaagagtaagcagaatgcactcttgcccaacccccgcggctccttggtaagccgtcttctgaccttcatctgcccggttggaaagcgcaagcgtcgagatgacaaagaataccgtcaccgcgacaacggcgaccatcaggattctgtacagccgcttgaagatggccagcttgttacgttgcttgcgcgcttgtagatgcatgatggtacctatcaggtgaccgaaagttgagccctggacccgttctgtatgagaacacggacgcgaggcttaccgttcaacgagatgatggtccacatcaggaaacaggtcaacgacaatgcgagagggaaaatcaagaagagtatgagaaagagtgaggcggtttcaagctcgaccctgaccgagccgatggcgtaaagtactgcgtgagtagatacaatgatcgttcatcagtacgatccatgcggtatcagtggtcgcgcttgactgacctccgaaaacgaagtggaacgctgtcaaaagcctaacgcggttcatcacgggacccaaactgggcgtgacgacgctcagacccatcgagacgacaagcaagaggaagaaagagattgaatttcttccagcgttgaggatggcaactgctcggaggaaacgccgatgagcacaaagcacgaggcgtctctctggcaatctcaagcacttaccaacaaaaaggaatgccagactgcctgacccaccgccgtgcttgttgatgtagcggtagtatccctggttggcaagcatctccactacgaggaagacgattgttccagtaatataccactgcaaaagggttctcaacttgtcagcaagacgatcgatacgggcatatttgagcaggttaagcgtacctgcataggcctagatcagaccgcagacaagggagatcggggtcagcgacggtagtagaaccgaggcaaaggccaggtgacttacaatagttctttgtaatgcttgacgcacagatagccccagcctccagctagtaccgcatacacggtactcagaaagagatagaactgcgagacacctgtacatcagcagacgtcccgccgagtatcgtgacggtcgttgagctcactccgatcttggggtactcggcagcgggaagttgtccctcgaaagtattcttgaacaggacggagccagagtagcttgcatgagtggtttcctgtctgggtaccatgtcggaacgttccagagaccgctttttgctgttaatcagcgtgacagggacgacacctggaatcgcttggcgttaggttcgaggctgattcgctgtcgagaagattgataggctcaccgacgcagtagtagccggtcttgggcacattgtagatgatactaccgtcgtacaaaggtacaacccccgactttgatgaaccaaacgtctgtccaggctttgtgacaacaggagcaggttgttccacatcaggatcctcggcatcatccaaaggttcgcctgtctgtccgtcgattggcaagtctgggtcgacctctgcgggttctccatcctcgcttgtatcttcctgatctaactcctcctgatcaatttgagcagatgtctcttcaaagtccccatcgatctcagattccaaatcctcctgggcactcctcttagcccgctgactgaaagggctcgtctcgtctgcaagttcttcttccagaatctcctcctcgtcctgcaattcagatgcggactcctcccgaccgacatcaagaaggctgtcgagtagtgcctcagctgcctcttcttcctcttccaaggtctcttctgcatcagcaacactggtaggcctaatccgggagtgggaggttgatgtagcgacttgctcttcatcttcatctgcatcctcggcaggcggttcttcggtttcatcttcaggagcggcggtagcagtggcatgagtagggcgatgacgagttttagtagggacaagaaggctggtggtctcttctggttgctcctcctggtcttcttgattttcgctgtcggtttgaccgaaacgaatacccgttgtgaacaggcttgtttggttcaattcggttccttctggaagcgtagtgatgaatgatccgagatcgtctcgcgtacataggcctgagcgaatggcggacgtcgtgcagatgtaggttttctggaggtattttaggccaggctgtctgtgagatgggtggcctcggtcgttcaggaaggaagcagacgtacgggcatcgaatcatcgccaggtgtatcagcgccgagatacttgacgtcgctccattcatacaggaccagcgctagctgcccagttgatgaagggtcgaatgtcactatgcaggtaaattgaagcgagcgcggatcagcgacgcgagcggcgctggcttggccacgagatgcgactcacaggagatgtatgctttttctccaccatacatgccgctgcaaacctccctcagctcatccgtatctctaatatcgactgcaagagcgactcgattgtcagttcacactgttgtgtgagcatttttcgccaagaatcatcctactcgccttggtaacctgatactgtgctcgacagcaaagaccaggcgagtgccgcaagtgttcccgttcgacatagagtgcccctcatcttgaagggtcttagtcggctgtcaagaacgatcttgcagtttgcgtagaggtgaaatgtttgacaattttgaggctcgacgtcaaatgttcaaccttcttgttccgagcgagttgtttcgttgcgagttgttatcggctgagcttcctttcctccttgcaactcctgccttctgccctctgcctttacctttctggctgtctccctgccgacgcgcactcctcccgcttccggtgatgccacgaggaagggaaccaaaagttgagtttcggaggcaaataccggaaagaggcaaatcacgtgacctcctcgtcgatgccgtaatccgcgttcggccgagtcggcgttgccctttccttgggaagctggctatgttgcggttctgcggaattgcacttagctctcttcggaacgtatcttcggaccgagaaccccgtcaacgctaacagatgcagcaagtacaataattcacaaaccccaccaacacgatcaaaaccactatccgctgctcgcgatctacggtccgactacataagccagcgattaatcggtagttcctcgcagattcgttacccgctttagagtacaagtagaacgccttttacatactcgatcgctgtatcgttcgcaacaagatcccaccatggacaagcacgtcgtcaatgacccccgaactctggctctcgatgctctgcgagggctagtcacatgcaacccagacctcgcgctggaggaaacatgtcgtatcgtccggcgtggtccccgcacccaccgaccgatatctgacaaggtccagctggtttccggaggtggttcaggtcatgagccttccttttcaggaatggtcggaaccggtctactcgatgcggccgtctgcggaaatgtgttcgccagtccgaatgttggacaaatccgtcgaggagtcgagctcgtgtcatcaactgccgcttcgagcgatgtcaacaaaggtgttctcatgatcatcatgcgatagtgagtaaggggaggatcgccgacacactgcgcatctgcgcgtaagctgatgtgatcgacattgtctagcaccggagacgttctccagtttgccctcactctcgaacactcccgctctaccaagccctcccttcccatctcgctgatcgtggtgggtgatgacgtttcggtcactcgaactcaaggtgccattgtcgggcgtcgaggattggccggtaccgttctggtgcacaaattggctggagcgatggccgagaggggggacgatctggaaaacatgactgccagtctgaacgggatcatcggacagatcggaacttgcggagtcggtctcggacactgcagcgtacccggttctggcggcggcgacgacgaagaggaacacgaagaaccccatctagcagctgatcatgtcgagattggtatgggtatccacaacgaacccggagtcctcaggatccctcttactaaggcctcagagctcgtccctcgtctgttggagtacatcacctcgacgtcggacaaggaacgtagctttgttcccttccaacacgacggtaaagacgaagtcgtgctactcgtcaacaaccttggagggatcagcgaggtggaaatgggtcttgtggccaaggaggccatttccgctctccactctcaaggcattcgagtgagacgagtcggtaccggcaaatacatggtgagtttcagcgtcccgcagactgaatcagtgcaatgcagagaggctgaccaccggttgtgccgaaaccgcaatctaattagacctctttgaatctgccaggattttccttgacgacgctgttacttccccgaacgagtgataccgcaacaagcctctcgtctgagcaagtcatcgagctgttggacgccccagcaacggcacccggttggatcccattgcacgagccgcgagagttgtcggactgcctcatccatttgacggaggacatgccacagacgaagagtgtcgagcagtctaggcgtacactaccatgtgagacacatcgctctgtcgcttcgttcacaagtgatgttctgatgacgtgcctactactcgcagtccctcaagacgatccgacgctgttctccaacgcggtcaaatcggcctgtgaaagcgtcatcaaagctgaacccgaaatcacgagatatgacaccagtaagtcaagcggcgtcactgtaacatttgagtggcgcttaccttgttctgtatcttgaagtcgccggtgatggagattgcggaacctgcctgaaagctggagcggaaggcaagttccggtcgtatcgagaaccgttcgcatgacttacaatttcgatgtcacgctccatcctgcatacagaaatcttgaaggcgtttcagcagggtcaaatttctgaccaggatgtgccctctgcgatcctgggtctggccgaggctgtgagtctgtctgagggatcgagttccttctttgtgcctgatgataggccctattgcacgagcagatggaacgtgtcatggacggaacttcgggagcgctgtattcgattacgttcaacgcgctggccgctggcttccacaaccaagacctgacttcggccccaactgccaagaattggtcgatcgccctcgcgcacgccttgcattcgctgtacaagtacactaatgcgcgacctccttcccgaactctggtggatccgcttgacgcgttcgtaagagcttttgccgattcggaaggcgccaatttggacgatgcagtcgctcgtgcgagagacgcggcggaaaggacgaaagacttggtcgccaaggccggaagggctgcctatgtcgggcaagacacgcttaaagatcgacaggttcctgatccgggtgcttggggtgtgatcaagatcctcgaaggcttgcaagccgttctttctgcttgagaagcgacgttgcgcagcccgcatggtcttgtaccattgcacctgtatatacattgacatgccaaacatgaatggtcgcattaccttggggcaatctggtcaaattcgcgctgagcctgaagtctcgaattgatagtgatgtgccagttgcggtgtgcatcgctgatacaatggccgacacggcggatatacagaagtccggctgcagtgctgccgcttgacgtcggagcctgattggaaaaggtcttcacggacttggcggtcagaaaagctcccggcgctgatccagctagcccactttccaacgttgagcgaccgattggccataggacaccaattttccaatgggttgtcgttgctcacatgatcctgggccgaacagcgggaatgacacagcaggatcgtatatcgtagggtacaataacatccatgacaatgaatataatatccgggccagatttgagtatgatccttgcgttgtccgagcaaagtcaagctgtcagcaagttcacgcctcaacgtttcctatcggccatctccgacgaaatgttcaggtttcagatcagatccgcctcttcatcattcgtgacgaccatatgcaaggggcatcgccggcacgatcgggtacttggaaggtgtttcgcaacacaggccgaggttccattgtcagacgaccacgctgttctcagtgtcttcggtaagtccacaacgaggcgtatagcataggtcgtttctgagatcgcatcaagaaagcgcagatctcttctccatcggcgtcggtccttcctcgagtcatactgttggtccgatggttagtcgattcgctatgaaatcgacggcgaagaaactaatgtagacgcgaacgtgtccagagagccgctcgatcttttgtaacggtaggtctgacctggaaactgcaggcggcaatctgggggcatcctctcactgcggcatactcgtacgctgactgtcaatactgaatctaataggatctaacgagagcttcggttcttccccgagtacacaaggtgaagatacacctatacggaagtttggccgctaccgggaagggtcacatgacacctgaggcgagtcgtcgagtcgtgtattctccctcaaggcgccgagagttgacatcggtccgagcactatcgcaaacaggctatattgatgggattggagggtaagtgttgattttgttttgctgagacacgcggcttaatgaccctcaccggttataggcgaggctcccgagagcatagagtaagccgccagacccagcttgagcaagtgcttgattgtattgacccccactctctgtatctcagtgcggagagtatcccccgtcgctttgcctccatacaggatggcgctcctcttaacgtcaacggtcagaaaccggtaatgtttcagatggccaatgatctggtgagacttagcaacgaagatgagaccacggctgttcctcgctaaccaccagcctgacagaacatgtcactgcacgcgctgcctcgtcatccaaacgccatgtccatctcagcgttctcatctgacggagacatgctagcaaccaattcgtactacagtgtgggtggcggatttgtggaaagcgacgcgacccagtgtaagtcgaggatttaccggctagcactagtcaatgtagctgatgccaacatgcacattgcatacagattcggttaagttgcaagctgcaacgcggttcgtcattgaagaagcaagtaggagcaccaatcctccccgacaccctttcacgactgcctcggacctactagctatcgcttctcgacatgacgtaagtttgactattcgctctacctgccatttgagctgatgtaaactcccggctagctctctgtacacgaaatgtgaatgagtcataacgatctgtccgtactgtggccacgctgaaagtattcccaaattcagtatgaggctcaacgaatcggtatggcgggacgagctggaaattagcgctgggcttgttaaagtacgtgggagaagcagatttgcttgcgcttggactaaatgtctatgcttctcagctatgggaagtcatgaaggggagcatagaagcgggacttgtgacgagtaagcctctttctgttatactcatatcagtgacgataacttcgtgatttgtagaggaaactatattgccaggtgggctcaacctgcgacgacgggcaccatcattgtaccagggctggagacggatgcaagcgttgaacgccgtcccggtacgccaggaccgaatgacctggaatgccaggaggaagctgatggggttgtttctgcgagtatagccctcatccgaaaggcgcctcttgccagatatcaatctgttaagctgctttgcgatagccgtcaacgaagtgagttgcacacgatctatacttatgaacgtcaagtaacgattactctttcggttgtcagacgaatgcttccggggggagagtggtgactgcgcccagtaggtcttgacgggcttgtccttccgacaaagtctcgatactgagacatattgctttgcttattcagctaacggcgcttctggtgtaagtcttggatgtaccggttcacgaacagtgtagttccccgatataaattgcgttgctcttcaggtcattcccgctgtcttgaactacctgctagaaaccactgaagacaataccagctatcctctcctggtcgagcaggtgagttactgcatctattcggaggtcggtctgtcgtcgccaacacatcgctacagttcttgttgacttcggcagctatcgggatgctctgcaagaagcgcgccactatctctgcagcagaaggtggttgtatggccgaaatcggagtcgcaacctccatggcagctgcgggcctcacctcttgtctaggaggaaccgtcaagcaagtcctcatggctgctgaaatcggccttgaacacaatctaggccttacctgcgatcccatcaatgggtgcgtcggctttcacttttggtcgctttcgaagctgatatttaccgggtcatcgggatgagcgggtagactcgtgcaggttcgttgataccacgagccggaggcagagcacaaggatgaggaactcacatgccagattcacacaggtcccttgcatcgagcgaaacagtcttggtgccattaaggcggtaacaggtgagcaaccttcttgatattgaggatgccatactgatttgtccgatattcaaactggtccgaagcggctcaacttgctctggcgggccacgaggacccgaagatatgccttgataccatcatctctgctatgaaaggtgcgcgccttggaggagtcgatacttccggatgaaaggtgacggaacatgtttgaccacaatctctcttgatagatacggccaccaacatgcaccacaactacaaggagaccagtcttgggggtttggccgtaggtcggcaagactttttgctcgctaaagtaatatagctgatgccgatttcttagaccgcatatcgaccaaccttgattgcgccacaatgttgatactgtgctgaacgaggacctcttggctgtcgaggggaacccacttatcggttttgcttcttcgcaaggcgttcgcgtcgttggcgtttcaccgcttcgagctttgtcttcaaagtctgaactctatcatcagcatcctctctatggtcacgattgatacgatggccgatcagcagatggctcgtgaatagcctaagcggtatcgcttactgggctcgagcatcttcttctaagcgatcgatgatttcctctcgctcctccctctgtgatcgagcatgccgctcggcctcagtttcctcctcttcatcaagctcggctgtgccatcaattggcaggacgggcccctcagtgtctgccgtcaagcgtccagcaaagggattggacgcagctgtaggcgcggcggagatcgtgtttgcgtcatcagggattatgagggttggagccgcctcgtacaacgtttgcgtctcaggctgagacggcttgtaaagtttcttggtagcggctttggctgtagggatggaaggagcggcagaggcatcatccgtagcaattccagcgatcgatgacagaaagacatccagttcgtcatctaccactgtagcattggccatagaattgccagcagaggtcgaaacctcaagctttgtcctcttgttctgcctttggctgtccgtaggtgttgtcacagggctccccgacggagcttcttcaggagggggtaacgataccgagtccggcttacgccgcttggcggcttttgctgcagctttgtcttcatctgccttgacccgttgcagtgacgtcctatgttgtttgctagcggtatgggcagaccaatgtttgactgcacatacaaatcaatgaatcagtcggtgtaacaatttgtggttacatcttcggcgaactcaccgggtacagcacagattgaacagcgcagttcccctctacttgaagtggtcgcatgcgggtcctgaaccagttgagagctactcgcttgcgccttgtgggctcttagtaggctacgagcgtcagacatgtacgaaaagatttataagctttagggttcgggctgatctgccagaaagacggtctttccagtgcttctttcgaatgatgctatgtctaggcgctcatcagcccatcagctactaccactgctgcatcaaggtgatcacggacgtataatcatgtattagataacgcatgagcaatgtcggatgtatatatgcgttttcccatcgagccgaaccgatagagcacagagatcaaagaagctcaactctggttgcttcgaattcacaaccttctccataccattcgtgtgggaagggcaattagatcgccttgaactgatcagatctaggattgaacaatctgccgcttatactggctgcgtaaaatggttggaacgggcagatcagcacatgctcaagcgctgcttggcaaggacgcattcagtaagattcgtcattccagagttctggttgtcggcgcaggaggtatcggttgcgaactttgtgggtatcatcagccagaaacaccgaaagacaattcctctctgaagcttagattcgaccctgagatcagtaaagaacttggtccttgttggcttcgggaacatcgagatcgtcggtaacgaggtcgaccttaacatgccaagatgcttgaaccctgatcattccctatcctgccccaaaagattgacctggataccattgatttgtctaatctgaaccgacaatttctattcaggaaggcggatatcaagaaatccaaggcccttgtggcttccgcattcgctcatcaatttaatcctggtccaggaccgtccgagagctcagggatcgagggtcctggtacaaccggtggtgttgcaatcgacgccggcaagggtgtcaacatcaaagctagacatggaaatatcaaagaagcagagaacgacgtcgaatggatgaaaggattcgatctggtgatgagcgcccttgataatatgggttagctgacctgttcgcgagatctgagactgcaactgacgtcgctcgttgttacttctccacagaggcccgacgacacgtcaatcgtctatgcgtggctgccggtgtgccactgattgaatccggtacgcagggctatctcggtcaagttactccgatgcagaaggtgagcttgaactcaaagaggcgagctcagattgtcactcatactacccatccttctcaaggaccgcacggagtgctacgactgtatcagcaaaccgacacctaagactttcccagtctgcacgattcgagccaccccctccgaacctatacattgcatcgtttggggtaaaagctacctactcccgtgtgtacaatccttttccgcgtttcgcaaggttccatcagggctgatcggatgctcacttcatgaccgcgacaggaagttgttcggtgaggatgatgaggcagaggacgaacaggaattagagaaagccaaagcgaccgatcaggacggtatgcataacagcatctgcggacaaaacgtaaccattggaagctaaataagaatatcgttccaacgttgaagcgtctgttgcagaaatcgaagaactgaaaaaggaggctgcagcattccgtgacgtacggaagggtctgaacgaagacgatgggcccaagaagacattcgaaaaagtccgtgcgctgaatcaatgcggcggtgttgtcaacttcgattaaccgataatttcgataccaggtgttcggggacgatatccgtcggttgctcaaaatggaggacatgtggaaggtcccaggcagggtcaagccggttcctttggactactctactattctggatgggtctttccgcgtaccccctcttgctaaacctgcggcagcaccaggaaaagacgggtctatcgacccgaaacaggccaaccctgcggcttcaattgatatccgttcagagaaactcagagatcaacaagatttgactttgaagcaaaatctggagctcttcttggacaggtaaggaatacattcatttgttttccgtttcttgggtaccttcataatttacatgctggcatcgatatgaaatgcgcagctgtaagagattatctgcacgcgccataatggatccggggcactatatcgctttcgacaaggacgacgaggacacgctcgactttgttctcgctactgcgaatttacgagctacagcttatgggatccccactaagacacgcttcgacgtcaagggtacgagtcggctactcataattagattgcaatctgacctgcctttcctctatgtacagaaatggctggtaacatcattcccgccatcgcaacaaccaatgccatcattgcaggatatattgtgatgcgagcgatcaacatcctccagaatgattggagcagctgctccaacgtgtatcttcgaggtaacccagctcggctgattgcgcctatcgccctgcaaccgccagaggaggtctgcggtgtctgtgcggatacatacgtcccgcttgcatgtgatgtcgacaagttgacacttggctctttcgtgggagacatcgttcgatcttggctcggttggaagacggacgacgacggcgaattaaaggaggtcgcagtctacgaggacaagcggctcctcgccgatcccgattttgatgacaattacggaaagacattggccgaactcggcgttatcagggggaaaactcttactgtgaccgacgaagataacctatatcggaacgtcaatttctcgatctgtgctttgtgagtctgcaagtccaacccttgctatgcagtcgacctgatacgcgactcgtatccgcagacctgcgtctgccagcggtagctaccaccttcctactcaggtcccgcagattccgagacagcccaaggcccccagtccagctccaccttcgtccgttccatctatcgccggaatgaaaaggtcggccgacgagcttgaagactacgctgccagttctagcaagaaacagagattgcacgacggtggcgcgggtcaggtcggaacgattgacgtgagcgatgatgagatcgaaatcctataagcccgatctacgggtttcagagacgacgggataaaagtttcgtgtagttgggcataatgttgtacgaccgatagcttctcattggagaaatagcctacaatacttgacattcgccccaaacgcttagaataatcccattgtggcaggctatcgacggtaattctctaaaagcccgacgatcttgataccggatacctgcggagtttctagacgtatagatgctctccatgtgcttccgaattcgaccagagggatactcggttccgacccagctgatctttttcggctgtgggcatcgaacgacatgacgcgttccaatttagatgagagcttgaaggtcaacgagtgtaaatccgctagcccgggcaccgtttgggcccgggaacgactgacgatattattctgctctcggtacgcttgactactctcaacaaacgtctttgtagcgatcatgcatgcctcatccgcatctacggaatccgtattgtgtatgtttggtcgaaatggtaggtccagaacttgtagtagcggatagtgccgtttgaggaaagttgcaaattccgcctatggtttagaggctcgaggtcaacccgcgcaacgatcgctagtctagatcatgtatcaaattggagcgtaccattgcgatgttatcaagtggaaggatagctccaaacgcgagaatagataattgtctgaggctcgtcaatacgcgacggctctgcgttaggcagtcaagagcaatctctatagtgtcctgttgtgccgagctcgggtgttgcagtccgaccgaatattgatgagcgaggtcgaagcgaagaatctccacttggatatggtccatggactgaaagatatccaaggttgccatgtaggctgcaatgtccatcttcactgcacgcaagtccaactccagcaggcaaggggcgtgatgcacaagcagatagaggttgccgaccttgtaatcgatgcgatcctgatcgtctgactgcacccgactcagaaagaagtccggacttgtcccctgcgagagagcaggagcggcatcccggcttctggaaccgaaatagtcgtttctccaactactcgagtcggtccggtcgctggcgttgactggcccgagaggggtgagtggagcagatcctggcacgagattcgatgggagatcgatatagcttctggaagacgggcccgggacgatgtgtgtgcgcttgtggggtacaccttcagcctgctcttcggccagaagagctattcgaaaccatatttcgcttgggatacgacacactgccgatagtatggcaccctcgcacattttgtctggatccgtagactgttgtctgagagctggaacccatatagaaacggctaaatgcaaagtacctagttcaatgaagggcgtgaacagctatgcagatgttctggacgttctcgatgtgctatcagaagtatgctgagtgccctgcaccgcgagcgcatatgcaagacttggcgaggcatatcactcacgcaagtgctctcgtgctgctccatgtcatgatctcaactgttcttgtgcgggagcctcaaaagcgtgacgtaatcaaatcggttggacaatagtgtattcgttttcgttttcgctatccgcggaacactcacttcgcaacctcttgcacaccttgcttgctccacgctgaacccctcccccctctccccgcgcccccccttgcttgccccttttgcacttttgccttcgcttccgcaccttttcaacttttggtattgctacggcgtcaactggctacgctcagccctcagactcggtcgctaaagaaacggtcgaccaccgccaaaggctcaaacatttcacccagtttccttttgactgaattaaagcaaacgcctcgatctatacatcagggattcaaaaagatcacaggtggtcaagtaaaacaaagaacgagaacgcaagatctcttgacaagcaataaacaagaacagataagcatataccatcatggctccttccgcttctaagcaaaaagtgagtacttgagacgtgcagtggcaatcgctatttttgaggatcatgaaatgttgacacctgtccgacattgtgcacttagcgtttggctgaaaaggtacgcccgctcaggccaggtctgatcagagttgcgactgaccgttagttgtgtgctcacattgcaatacacaggctgccaaggcctccgcttctggcaaaggttcgactaccaccactggtgccaacactcccttgacctcggtttccgctcccgagtccgagaacggcgatgtcgctgtcaacagcgctgctgccgccatggcaaagctctcctcggccactgaccggtacgctcatttcgtcctgtcgtccatacaatgagcgaattctcatttcggcatgtatccttaccatgccacacagatccgcaaacggtgttttggtatccgatgtcaagggacgtgatatcaagatcgactcgtactcgctgtcttaccatgggcgacttctgatcgagggagctgagatcagtttgaactacggtcaacgttacggtctgttgggtgagaacggtagcggaaagtcgaccttcttgaagtccatcgccgagcgagacgttgagattcccgagcacatcgatgtgcgtatatgtcgcgcaagtaccgcaacgtccagaagcacgcattgaccgtgcaatcgctttctgaattgacagatctacctcgtcagcggtgctgtcgagccttcggacgttaacgctgtcgactacatcattgcatcggccaaggcgaagatggagcgattggagaagcagatcgaagacatgtctattgcggacgacgtcgacgaattggcactcgaggcaaagtacgaggagctcgaggagatgggagatgtcaacaccttcgaggctaaggctggagccattttgaccggtctgggtttcactcaacccatgttggccaagcctaccaaggacatgtccggaggttggaggatgcgagtggctctcgcccgagccctgttcgtcaagccccatcttttgcttttggacgagcctacgagtcatttggatcttggagccgttgtctggctcgaggcctacttggctacttacaatcacatcctcgtcttcacctcgtgggtagacctctgattacgctgcagcaacatactcataagcttacgccttttacgtgaccaggcactcgcaggatttcatggacaatgtgtgcaccaacatgatggacctgtccttgcagaagaagctggtctactacggtggtaactacaccacttatgtgcgaaccaagagcgaaaacgaagtcaaccagatgaaggcatacacgaaacaacaagacgagatccagcacatcaagagtcagcatcacccattctgttgcagtataacggtccgaatcagctaacccttctcgtccatcagagttcatcgcttccgctggtacttacgcaaacttggtcaagcaagccaagtccaagcagaaggtaccactgaaatcaactcgcgtacaaacacgaacagtggctgaccgaaatgttgttttcgtttctagatcatcgacaagatggaggctgcgggtctgatagagaaggtcgaacagccgaaggtactcaggttcaacttcgaagatgttgccaagctacctcctcccaacatcgccttcaatgacgtcgcgttctcgtactctggcgagaagaaagacttcctctaccaaggcttgagtttcggtatcgacatggattctaggtatgcctcaggctcgccaccgtttcatgcacctctgtattgagcttctcgcacgcttgatagaattgccatcgttggagacaacggtaccggtaaatccaccctgctgaatttgattaccggccagttgtcccctgtccagggaactgtttccaagcaccctgctctcaaacttgccaagtactcgcagcactcggccgatcagcttccttacgacaaatcgcctgtcgaacaccttgaatctacttacaaagctaagtacccggagaaggatatccagtactggcgacaacaggtcggtcgattcggtgtgaccggagcccatcagaccaacccaattgcggagctttcggatggtttgcgtaacgtaagtcggcttccattgcagtcgtagccagtcgtcaagttctcccttggttgatctctgcttgacatcgatgcacagcgagttgttttcgcaatgttggccctcgagacccctcatatcttgcttttggacgaacctacaaaccacttggacatggagtcgatcgattcgctcgccaaagcgatcaacgaattcactggaggagtcgttatcgtctcgcacgatttccgtaagtccggactccccgaattgatcgtgcagtctccttggaaaccaaattgatcaagattacatgcgcaacatcgcaggtctaatcagtcaggtcgcacagaccctgtgggaagtcaaggataagaagattgccgaccttaccaagcaggacattaccatcgtcgactacaagaaacagttggcaaagaggagtgagtgccgaaaacgaggtgtagacggctatcaaggccaggttgctcggtgctgatccacttttctgctattaggtcaagctcagatcgagaaggctgctctgctttccaaaacttccactggcggcaaattgtagacgggagacgttgcgattctttctgggtttgttttttcttcttgcacctgcggtttatacatcgcgtagaattagtcatgattgtatcttttacactgagaggcatgttcgtgattcagacgatgatgcgagacttggaaatggacggcacaccgttcgtgcggaagtttgcggaagcaaaattggaaatacgattggatcgatccgcggcgatgtttccgtcgagatttgggggatgtctcaagcaagtcttgtggccttgtggcgatatctacatccccctttccgtggtctcgcaacctgcaacccaagtgttgttggacatcaaaacgatcggaccctttgctcacggaatagaattgatcagtactagctttttcgccgacttggacaccacggtcgaaccgatacgacactctctccagacttcgcacgccgccttcatacatcaggctgtcagatcatgtttgaatcacaaatcaagaatgctagtgtaggcgtggcgaggcatgtgagcatccgctggtctacttgcagttcaacacagtcctgacagtcagatggcaatccacgcaggctatgagactttcgcggtcccgaacaaggggtctcgcgacagctgcaggacttgacaagccgagtcagttctcgaagaagttggccgatggtccctccttcgatgagttcgtcggaggcgacgagatcgctcaaggaactagagtcagtttgggcaacctgaaaacgtgagctctttaggcggtctcttcttgccgccttctcttgctcaagcgaatgaactacggagcagacctcgtctgccttcacacctaaaagctaagataccgactggaggttcttatgccagcatcaagaaggaccttcgaggcttgggcctccataccgtatgcgaagaggctaggtgtcccaatatcggtgaatgctggggaggcgggaaagacggagttgagggcaaacgaggagcaactgccactatcatggtacggcatgatgccatgcacgtggccattgtcagacgcaaactgatcgggtatgccttcacagctaatgggcgacacctgcactagggggtgtaggttctgctctatcaagacttcccgagcgcctccaccgctcgacccgcacgagcctgaaaacacggccgaagctatcagccgatggggtcttgggtacatcgtgttgacaagcgtggatcgagatgatctggtcgatggaggctccaagcatattgctgagactatcatgaagattaagcagaagtcagtacactccgatttgaacgatttcccgtcggccttacgcgatgttaaactggccttactgctgtcattagggccccggacattttagtcgaagccctggctccagacttttccggcaacgtcgagcatgtcgaaactgtcgctctatcgggtctcgatgtcttcgctcacaacgtcgaaaccgtgccccgatgcaccccattcgtgcgagatcgtagagcgaatttcgaacagagcatcaaagtcttacgacgagctaaggaagcctccagggccgccggtcacgaagtgattacaaagacgagtatcatgctgggagttggggaaacagagaccgaggtcaaagaagccctgcagcgtgagccattcttatctttcgtctaagcccgatgcgaatctcagcttgcgcctgaatcgtctattcaggtttgagggatattgaagtggacgtagtcaccttcggtcaatacatgcggccgaccaaaaagcatatgaaggtcgaccgatacgtcgatccgggtgaattcgatgtctggcgaactgttgccgagaacatgggcttcctttatgttgcgtctggtcccttagtgaggagcagctataaggcgagtagatgtgggggtgcatcattccgagcataaagctgactgtcgccgccctatctttgatgcaccacaggctggcgagttcttcctgcataatgtcttgaagaaacggagggaagcagccgccaaagttgacgcgggtcgcttgatcgctgctggcgaggctgcagtccagctagattcgcacaagactaaacagtagtgacagccataccctccagaatgtgtcgtctttccgctgttgttgtacacttattattatacgaccgaggtctgaaatgattccagcgccatgcgcggcagaaccaggccatgcaggccacagactttatttagattcgcgttcggactttcttttggacgcgttttgatcgattagatatcgctgcggccacgacgatggcatattcctatctcggaactgaatgctttctcgtcttcctcttgcacggaatcgttaagtcaaagcttccgattcgcatatcgccacgctcaatccactcaaggccaaggaaacacacctcactaggacgttcacgcttttgctcagcttccgaacgattcaaaccaccaatcgactgtcgtacagcgacccgcgccctgcttgcatctgatgatgacttgagagggcaaaccacaagccggctagcactgcaggactctgaaatccttgtcagtatcctggtcattcgagtgtgttcgcccggacgctggacgtcgccgattcacgcggacttcttctatccaagatgcacactttgtcgtacgatcctgtggagtccaccggttcgacaccgccggggggttcatctagagatacggccgagcatgtgctacgaggaagtgcccatcggtcagatggacgtcgggtacctggtattctcggcttggactcgccggatgacggcccccaatcagtttccggcacgattcccgacatcgctcaggtgtttactatgtatcagctgaacgaggtggcgccaacgaaaccaccattacgacaatcccatacttatcccgagacgaaacaccggaatgaccttgtaacgcaatggtccggggcaagcggctcagacgagtctgctgatcatgtacccgtgcttcccggctcgcgagaacgttggagacaagcgacgtcgtcatcagaacagcctcatagatacattgccgctgagaaacgagcaagagagagggcatctactgccgatcgagattcgacctatgctagcatggctcccgctccgaaccggcaacgtagcggaattggagatgttattccaggcaactcaagcgactctgggcggagcgtcgctcctgcgatgagaagggaaacgacgaatcggtccttggtatcaggttactccactaccacctctgaaacacccagaccgcacagtgctgaagcggaaccattggaaaggcatctagcgatcaaaaccatgcaaagcactaccgaatatccgccgaacgacgcttcagatggctctttcgcagcatattcccgttcaacaagtgtaagctccttcagtcaacgatctcatggcctatccagtcccgttgtcgcggagggattttccagccaagccctcgatctggtagatgagggcaggagcaaaaccgtcgactctgctcgagttgcgcagtggggagggccggctcagctggtctccaggctccaaaacgagaaagctggtcatttcgatggcggtgtcatagaggatctcagaggtgaatcttgaagctaaacatcgcttgtcgaactcgctaattttcaagaacaggctccactcacgtgctgttgccctcgctggagccccaagggcaggtctttgctttattgacagcgctgctgcctataatccagagtagcttggtcgtcttggatattcacaacaacctcctgcaaaggctacccgatggcctcgcttcttgcaatgcacttgaggagatcaatgtttctggaaaccctatttcggaagtgccggtctggatcggagagatggtcagtttgcatgtagcaatacttgacgattgcagtctgcgatccttgccatcgaccttaatggccgcgcagcatcttcataccatatgcggtgagtctcctttccatcacaaatccagggtgcatcatgctaagcgcaacactctgcggcctctcagtccgccgtaataaactcatatccttgccatcctggctgtctcaattgccggggctcgaaacgctgcttatagacggaaaccctttcgttgggccgtggaaaacgctgagcgagaccatttgcggtagactggcaactacgtttcccgaacctcttgccagatcgacagaatccgatcgaagcgtcaacgtctggaatggcattcaagaccttacgatcggctccgacgtgcaaatgctagactctgttaggaaagctgacaaatcacgcgcacttggttctgttccttacggagggacctgcgccggcaacctaaaccaaagttcgagtaaacgtcaaatggtagctcgcagctcggggagtctacgtcgcatgcagagtgcaggtgctcttttgggtttggcatcatcgctcgatcaacgtcctccgttacatggcacggtgacaaccagtgggatcccgcatagcatagcctcagacaaaagacgcattcgagaggactcgggctctagtgatgaggaaatcgaggtgttaactgcttcagccaatgagaacactgcgtcagatgcgacgataataagcaatcccgcgcccaaatcacgcaaatggggcttcttaagaaagatgagcatgggcaagatgcgcgtgtcttcgtacggaaacagtcagacacctccaccaataccagacgttcgtggacgggtttcgtctgcccctcatcaagagtcgggcaaaacacgcaacccgtccttgcgaaaaatcgatgcctccgtcacccaatctgcccatagacgcgatagagggaaccggagaagcttcttgcctatattggagggacctcccttgctaaatgtcgccattccctctttctctgcatcaccgttcagcatttccaccctttccctcaacggaccgagcgatcccattggcgcaggacccagctcatcgttcatcgactctcctacgtcttttgctacgctgcgttcaaattcgtctcatcaagactctccatacaatagcgccgtgacttaccaaactggacttaaatctatcgtatcctatctcggggatctatatgacctgtcattgccagtgcctgcggtcctgggcggtgctgaagtcatacaaagtgatccggggaacacttccgcttccatatcggttacgtctgaagctaggtcgggggcttcctctcctcacatcgggacctctaccgaaatgaacaggaatacgagcactcgacatccaaatgtgaacgcccctggtcaggatcgatcgagaggagattctccagcaggtccgatgtcgcccgcgtttacagagagatcgggggttgctgagagtcagttctcacctcggccgccttctgtggcgaaggcagcggacgacgtggccgtgtcgaccaaacgttacaaggatgaccccgtcgtccgctgcggagttgtgaggcacataatcgagtgagtctcgcgctctcagagacagtagagagacagcattgacctctcatcttatcagtaccgagaggagttatgtcagaggtcttgaagatctggtatcgatttacgtcagacccgcctctcagtctatttccaaaaatgacggggaaacggtcataccagccaacgagagaaagatcgtttttgggggtgtcgagggcattttacaatttcactctcagagcttcttgcctgccctggagaaagccgccgagtcactcctccgttctaaaagccacttgagcggtggtacctcccaacgattggccattcaaatcgccaacgtgttccaacaataccatccgttcatgcggcaatactcttcatacatcaacaatttcgattatgcgttgatgcgcttggaaagctggaaaggaggcgtcgaaaaagctgcagccaacaatgctcccttacagacggatggtgcgacaccataccaagacgctgccgcttcatctctgaccgctggtgcccttactgccggcttaggcatcgcttctatgggttcaaccgggccgtcgggaaaaggcagcaatgctacgactctttcaggattgacaatcccccaaaagaagcgcatcaagacctttctgaaggtaacccaattctgcttacgcatgctatcaagttcttgactatgcgccttcatcatttaatagcaatgccgcaagcatcctcgccactctcagctcaacctggaaagttacctgttattaccggtgcagcggatacctcgctatcggatgctagtgagctatctttataagccgggttgcggcttcggctgataagcggatgactagttggaagacctggcccgttgcacaccgccaaatcatgattctttcggtgatcctatcgaagaagcgctacaggaaatggtcagcttagcctccacaatgaatgaggagaagcgagactcggaatctagaaggaagcttgtcaagtcagtatcccctaatggcaatgtgcgcatgtagctaagggatttggcgtgcttcgcttcccaggtggcaacaacgtatccgtggaagattcgctactccgctcgtacaagcacacagacgtcttttgcttgacggtcagctgacgataactcggaatgtcaagcgatcggctaccctggtcgaggtgcccgaacggatgctcaatggcgaggatcaccaagactacaccatcaccagcagaaagagcattgtacaagtggagacactggccccagaagtcatggagcggcctgttctggtgctgctaacaacggacatgatgctcctctgcaaagacccgtcgcacggacaagacccagattgtgcggtagagctgttcgccgttttgaagctgcaaaccaaacgcaaacccgccagcgtcatcaacggcaacggcatacggctagtggacaatcgagtgagtatcgaaatcacggcgtcccccgcaccggcgctgcacgcgaagtgctgcttacctgttacggctgtgatttatgcagaacatcctatacctgtcggcgccgaccagtcaggaagcgcatctatgggtcgagaccatcaatgatagacgattacactaaaggaccggatgtctcctacgctatcttcagtgaaggcaagatgatctgagagatgcaactttggttccttgcaaaacgaaaacggctctgttgacgttttagcggggtagcccaggacgggtccacttgcgacatcatccgacggttattgtcggccacaagttcattgcgcgcttgtgcgaagtcgatgtcaccagattgagtgtggtgtcgtgaaaacaccacagtgggatgtgaggttctataacatttaatatgcgtctaggtgttacttgaagaaaggcatcgccactattaatttcgtacgggactaccgcgggggaaggctcttcttccattgctattgagacttgagtcagcgttgcgagtgactagaacgactggaggcatccacttgcgctgtggtcaaattgcgtgaaatcgtcgctctccgataacaaagacaactgtgacgcaaacattgttcttcagcaaaccggtatatcggatacgacctcgtgcaaaacggtattcacatagcgagagagcttgaccagttgatcgtctcgtccgtccccgtgataagctcggatctgaagtgcgaaaaagggtttctgctcagtcactgaatcggcggtcttcatagagcggaaccatggtcaccttgagaccttcgtgtggattcagtgcgaaatttcggctaagctacgcagacattgcgatggtatcagtatctcaacagggacgctatccaaaaagcgattcacatcatctatatggatcgtatttttggcgcccctgagaaaggctattgtaagtggaccgtcgattttagtaacgagtaatactcaccactgttgctcaaatgccggctgctgccacagaaaagatagaggcttgacctggtcgtcggagtcggtatgagatcatctacctaggaaagggaacgtctcgttgtcgtacctcatgcttgtagacttggccgtttctctgcccaaaaattgggaacatgcttttccgatcacaaacacagagtaacttgtgggtcgttcatgccaatcagactccttagagctcattgccaagtgtgtccctccccttcctcaccttgtgcctcttagtttcgtcgcctataatgccgcattcgtacagcttgctttctagccacctgtacccacaaggcaattcagattggcggcgacgatgcactgataaccgtgcgcaccaatagttggtttgcgaccatatcacgatatcgtaattttcatactgctgaggcgcaaatcagtgcttgcatcgggtcgagcgctcgaaaagcataccgctttttcgagaaactggtgcagtgtcggcctcaagcactcgagtggaggcaaggacccggccaacaatggtttagagtcgacaagagctaggcagaatttcagtctacaaagtaagcggaggcacaactgttgaagataaagcttactgtaatccaggtcgagaacaagcaatttttttcccggccgaggaggattgataatctatccgtttccgatcaatcgacccgtcaacgagatgcacaggaatcatgccgaggtgaaaagcgcgcacgttaacaggataatcactgagcttctgtgcaattagtcgaatattcctgggatcttcggctggtgaaagcctagcttctgcatcgctgtcttgatctgcgacgtgccttatggtgagcccgactctagtgcgaaaggattggtgtttgcatggctcacaaacaacgtcaaaactatcggcgacatcagaaaattgcgttaggccgacttgatgtggatctttgaaggtcttgtcttcaggagtcccgaccaagacgaatttgttcgttcgcgccgggacctgcaactgcgagctgagtagcggcgtcgagtgaaccgacagtctgagtccacgctgctttacaatcttacgcacatcaggctttcatcccctggcagcttctgtttcgtgagaccgatgtacttctgtcgctcagccgggacagccgttgcccgggttacagcggtctttcatttcagagactaattcagcgacctcccctacagatagactcctaacaggaattaccttaagatcgtacaatctacacagtcattgaggttagtagggtctgtatcgagctaactacagttggaacgcacctatccgaaccttgtaggttcagctgaaagtgtcgccccgaccaagtaaaggtaaacgtataggtttcgtcttcctccaacctagggtcgacaggcgacggttgtgtcgcaagggcgcccccttgattagattccacttcaagcaactgctgtggaccacccccgatttcaatgtcaggaatggctctgtgcagagcagacggagatgcttcagtcggattgatcatcttggttctcgaccgcttcagatatcaggtccgcttgatacgatggtgcaaagccctggcatggcttttgtacacgggtcgatttcgcgagcggcaagtagagggtaaaaccctatccttttgcttagactctgtggcaccccggccggtaggcatgatagtacacagtacatacacggactacagagtagagtgtagtgtattcctttgacccctttgatgatccttgctaaagtcccggtccccgagtatgacgaatctgtcgcgtaacgccgagacaactaattacctaggggaaaagctgaccagctcatccttgattgtctttgcatgttcctcacccatagctaccaactttgaacctttgctgacactctcagaggagccagtatatgtatgagaaggaaatgctgtcccactgtgacagcaagttcctttatatatagctgtcgttattgcgactacagagcaccgccttggttctaaagactgacagtgtgaagtcgactgaagatgggttttcaactgccttggtaaaattccttcagcccctcatcctaggcaagtctggaatgcattacagatgcattgtcaaaacttatgctgctggcagtctaacactgctcaaattgcacgcagcaggaaattcctcaattgcacaatacgccaacccagatatctgagggaagctctgagtgaaaattgtttctagacaccccgctgtactacaaaatgataatgaaccaatacctaggcatttgctgttgctttcaaactatgacctctacctttgtgcggcttttgctcactgctcaggtggaaaggcccaacaggaacgacttgatacatggtggagtgacatataatgtgcaagagtctatgaagcgagttactgctttggtaggttcatgcatgtacctcaaccagctggggaagaggaataagtccaggatttgggtatacacaatagataatgggcagggaagagtttggaatagcattctcagcaggttcgctaccaaattgagcttggcaactaggaggattgtgaaggggctagaatcgagtctgacttccccagaaactatctatagtgatctcttagagaattaatctgcttccttcgtgtagcagaacttgttctgccggtaatttttccattaattgtatgatataattgctactagcccttttagactgccaggtatctatgaccgtccacttttttctccattctttggtggaaaacgcacatgcacacactgggagttgatgacgcactgagatttttgcaacaggggaagctggctgacccctgagaacagaagaacgttggaaacttgcaataaaaccatggggacttgaacaaatcagagcggatgatgacagtgaacaagccactctgaagatgaatcagcacaaacagtaactatgtgccactttgttgcttattgcttgtgaccacttgctgctgcctgttacttctactagcgacttctttcagagacacacgtatataactaggtatcggacatattggtactactgtctcctgtactgttgtaccagtccgacttctaaatatcaatcattgtatccttatccttgaaagctttcaacaagttggccatgtgtcaatgaccaacactgacaaattcagcagcttgcaccaaatttacattcactaaacaaatccttctgcctatttccatcaaccattaatattgctaagtggaagttgagcagctactgtcacgtgactcgacgagcgcgagcgtgagacgcaacctaccatccagaaagacatcagaactacttgaaatttcttagtatcagttcctattgtttctctagtgatttctatgggaaacaataggtatgttaccttcatctgttttgtagtagttctaacttacttatcaagtgatttctatgggaaacaatagttaccttagataatgttgtgtagaatgaggggtcaggtcctgttgaagattggcatgctatgacatcataggtgatgctcagggtgcaatctcaagcacaaagggtcaacatgtaactaggatcacatgttgtgactggagtcacacatctgtgactggagtcgcgcttatgcaactggagtcgcacttatgcgtctgggtcgcaaattcgcaacaagcctagtcgcaagtatactgggaggaatcttcagaggatatactcatcagaacagtatatataggaaaccatctggacctcatttcctttccctctaccatgtactactttacttctatacaagcaacattgattccccttcacaacaatgcaagcatcatctatcttctgcaagagacaatagacatagtgactacaatcattaccaggagtggctatacaccattggcagcagccaatatcacaacaagcactagttctactacgacggtctacactatgggatatgcctctctagtgttctatgtgtctgatacgaggccctctccaagggatcgtcctcagagtctgtaccagacacatagagcactagagagacgtattccataatgtagactgttgtagtagaactagtgctgcatcccttatacaatcctcagtaggaggcctaaggtgcaagtaccgcacagacgaacaaggagttagctgaggtccatccctaacagggttgcagaccatgcagcacaggctgagggggagaattgactggcttgtaatacactggtagccttttcgctcacattgggaatctgtatgttgtcaagaagaagccctctatcactgctcagatcgcaccgcagaacatacccaggagcaagctttgcaaagtgccagcgtcaatgcctagaggacatccatagtcaaagtccacttgctgtggtgaatacagagccctcggtttgcatttgccgaatgctttatccctcagtatctaacataaatatatactccaatcttacggccatgatcctctgatgatgttctacttagatctactccttcttatgacaactttgtctccgtcgtttcgctttaccctgagataagttcattgttatgttataagtctatgacctgtagctactaaagaaaggcataggaagtatacctttcccacatgctgctaattgttcacttgcattgtgagattcaaacgcagttgccagcttccttttcacatcctccttggcagaatctgtgggcattgtggtcgctgctattgttgttttggtctccttacctgtctcaagagaggaactgcaggagttgctggtgaaggggtcccacactggcaagagcaattccagtcctatgatatttgaggcacctccctcttcttgcgagagatttgctagcttcaacatccatgcggccactcctgttggtgattgcattgttggatccacctcagacgtatctttggtgaatatgactcattatcatatcacatattgaaaacacattggtattctacattgttcaacatcaaaatgatatggactccgtttctcaatatcaaaacatcttgcacactatctctctctcttcttggactgactcaaacagacttgtctcgttctgattgctgcatatactagaactcaagtcctctatcccaactattttaactgttcctgcctcttgcaaatgatcaaaagtctgataacatatgctagcaatattaatctagcctttgcatcaccttggtctcaacttcacctcaactttgtcttaccttgtcaggccttgaaaactcatcacagtctaagttacacacctgaatcctgtggcccctatactggtttacgcagcttctgctcatccacttgatggcttctgactcggagtgggtcgatttgtgacacgtgggtaggacctttcttcgaaactcgtagcatctcctctgggaatcagcaagggagacatccttgacaacatatatcccgacagttgctccctttgatgcattgaaaaggtctgcccaaagaaccttccacttgacatacttgttgagaagagattgttgttgttagggtggagggttccatctgaaggttccatgggagaagtaagcaggagaggggcaaaggtaggagtcattgtgtacaagtaataacggatgtaggcatccgtaacaaagtagtacagtagaacgtcaacagacggactttcacttggggcatccccttgcacaccccctccggcgcgtcacgtgatgcgcccctcgggtgggccgttgcctacagcctgggcggtaacagatgtgctacaagggtgtcaaatttatccatgtgagactcgcaccagaagtgttcctgtttgagttgcacaagaggattgggtggaaggatcgattcttgtcacagggcgacactgattcaggagttcggtactttggtcgtacacatggcggacaggtcagcttgaggacggactgaatatatgcaccgcggacgttcattatcaaagagacacaacttagcacaaacttgtgtttgggagacacggctgcatagtgaccttgttatattgtacatctgcttgccttcgattagggtaatagccacagcctgtagtaatttccctctgtcggtagggagtccagcatcttgatatggaattgttagtctccacttgcttgctacaaaggaagacaccaagtgaacgctagccccagagccatgcagattgaggcgcaaaccccatccagcgcctcctggcgtacttagatgataattgagtggaagtattggcagacattgtccaccagtatcatgattgcggacactactccatccacaatgatggtgtatctaggcggctcctagggccatcgggtaccctttctgtctcgcgatcatgaaaagcgttgccttcagctttacaatcctgaagccaacattgtgtatgaagatatcattcaggatcagccacatgggacatttgtcatgatttggacttttggccaaaaagcaaagaggaacgagttgactaggtggatagactggtcagtgcagtctgtcacgtgactctagacgcgcgcgccctctagtactaggtacttagaggggtaaaacacttagacatatattcatctctctttcttacatacctattgaacttcatcaatctaattgcatgttgttcaataggtaagttattgacattgtacaactcaatgattatcaatctaattgcatgttgttcaatagtaaagggataacttgtcaagtgaggaactcaataggcggtacagaaatggtgaacagagttcagaaagaagcaaactataatagtggtctcctgagaggaacagttctacaggaaactacaaaaaagtgcaatctggatatgtatatatacatgtattatatatatatatatatatatataatatagggacttggtagcaaagttggagatgaaacctattggtggtgggtcttatctcttgtctccacaagaggcatgttgaattccagtaagatgatgtgatgggtacctgaagcaggactgaaggcaatgtagacggttgttgcaacatgatgcgggaaacctttctgtggttacaacaaggttgggctttggccaattctcctacactctgcactgcaactccacgactatattcctgcctagggttgcacaattaattcgatactagcctactacgttgtcctacatatatgggatgttcctctccagcgttccagtgtctaattgggggaccttgctgggcattctttcttgaaacacatcatgcggccgcttctgttaggctgccagcagcacaggttcttctccgggatctgtaacggtagcttgtatataaatgagtgtgtttatggatgaagtacataatacaagaggtgtaactggctgtgtataagatatatgatactgctccaaaatacccctccaagagaggtcgctgtggctagacctatacgtgttacgtacgataatgggttggtacgcataccacggatggctataacaacttctctgtaacattccggtctggcggtccaagtagctatccacagatggcatcacgaactgaaagatgacagttaagtagtcacaacaggagtgaagccgagttcggctaatggaagcgaatttggttgggatgataagaatccgggttgatgtacggataaggaagtaatgtcgctagaggtagctaggatcgaaggcttgttcagtatgaacggtgggacgtctactacttagcgagtgtcctggattgtaacctcttcacaatacgtcctgaagatgcggtgctgttgcaactcagtaggcgtaaatagaatgcgatattggaacttgaccttcctagtacaagaacgtcgtctgccggattcggtcaagttctactaagtatatatatgaaaccgagagtacttgtagcgggtcgagaacaataggcggtccaagaacggtgaagcgaatttggaacaaagagaaccaaattgagggccgagaatcaaacatctaacaaagaggaatcatcatttgctgagccgagatgtctttgtttgatgtatttggttgtgaagctatgaggtcctcgtttgatatccgtcgatgccgctattgttcgccgctggtggtaatatcgaatatgcgttgtgtcgatcacagagagggtgacgagaccgcccgagccgaagtcggccgtgtaggagccggatccgcgtcgcttcccgtaacaggttcctccgaaaatggcacaagagggagaaaaacatcacgatactctgttagctcgtcaaacacaatagtacagacctttcgtagtgttcgctcagaaggcccccttgcggaaggaagagaaggaggaattcgagcctgttcatttcaaaaggacggttttgatgaatgactgcacatcaaaataaatgttgacggacatgacttctactcagcgctgccctgtatgttgaactggggctcccaggttctattgcaaggtcccgatggggacgtcagatggagaggggggatgaagtatcaacctcctttgcctttgctgccagatgtagcagcatccaagactccgcattgagttctctcttcctgatctccccaacgctcatggaagcgaagtggccaaggtgtcgagggagcgttgacagggtcagagagggtttggacgagatgggaggcagtctcagggtctcgatctcatggggtggcgattacaagacgccccatttggtatccctccacacatccaggcggctaaggcggttgggagagaagttgtgggggccatctcaaacatggtcagagccattcagtcagagatcaggtaccattcggcatatgccacggcctgggacctcacgtcaccatgcttgggttctcgggagctcattcttgcagacccagagagcgaggctctaagccagctggcgtaattggccgccactgtttgagcaccctctagatcccttcgagcattcttcaaggtggtccccctgcacctgaacacttgtttcaggcagatgatcgacctcattgtagagaccttgaggggattggatgtcagtcggtgaggccatcaattctttgctggtccacgtcaccattggtctcggtaacaacgtagtgccaccgttccggccatttaaaacggggataatcatttatacacagacagcccaagacatcatacactatatgtctggaagcgcatgaacaattccttggcatcctgtttcaatgtcccacctgatgcgttttattgccgtttagaagaacgtctcaatcggaagtactccctggtaaatgccgttacggaggacctggtaggtgacagtgacttcctggcagcatgtgtcacttctcttttagcatgtcggtaggcattggtgaagtttgacctctgatgatacaaaacattatctactgaccgtgtttggtcaatttctactaagtatgtatgtgtgcaagaacagcagtaaatattgacaagttggacgactaatacagctatttcattcaagagtgttttgtacttgtaggtagaacgaggcgcccaggattcaattggcaaatctggagcctcttcttctgttcttacattgatgtatctcctgttgcaaataggcatgccatgattggctcatggatgtaggaagcaatctcaaccacaaagcctcattctgtagagtgtacattgtacattggactttgtacaatctacaggattcactgtaaaatgtacaggtttcaagggcttgtggagccatgaaggctaccatcagaatagtatataaaggaggccaatctgtcctcattcctttttccctctcatgtactactctacttctatcaaagcaacattgatcatcctttcacaacaaggcatcatcagcaccaaccacagtgcctagacccagcaagtaaccaatctttgtggatctagttgttacttcacaacatctcctgcgtgtgtacagtcaattgttcccctttgcctttctgtttgatcgatctccacctgtctaactccacatgggttccctaaggacttacaaggaaccgaagcatcattcaccttgcggttctggcacaattgttacaggacgagtgaggacgttaccgtcaagagcgcacataaccgcaccaagctataccaggatcaccggagcgcaatcaggccgggcaagggcagcagcggaacccacaggccattgcgcaatagcggtaccgcatggaatgcggcggaatggtgcaacagattgtagaagtatatagagtgcacaaatcagttagagtacaaacgaccttgtaactcagatgattcaagcgcagtcgtaacattcaacatacacctaccttgttacgtatcaaaagacatattaggagaggttacagcccatcattgacaagaaagcaagcaagcgcacagtaccgcacgatactgcgccacgtagtacatacatgtcaccctaccatgtgtgttgaacccttaccttttctcacgcgtcttcaccaatacacaccctgcacacctgacatgtcattgagacctgtgtgcccagactagcctgttacatactgtaccaaagagccgcttgctgatcgcccgtaacaacaatatatgccgcaatagtaagacgatctggtgaatctgcaccacatattagccagagactaatacatggacagagaaaagaagtatgaagctggagtagtacatagaagtcctacctcaccttctggaaaagaaaatgagccaggctatagcatctatcagggtctgtctctgaccacttccggcaactgccaacgggagacatgttttcaacggggccctccaaaggtgggaagtattagtataccctctgtcagaccatagggaacatgtggaagacatacgcctttcgagtgcacctgaaagaagtctagactgatcgccactcgaggcccatctacaggaattggacaacatggtggagtataccaacacaaactaagagaaggtgttcaatagaaggattataaggtgtgagagttggtcatgctctcaaacaaaaagataacaaattgtgagacctaggaagaagctggagtggcaagcccaagaccattctgtcatcactatacttgaacgaaaccaaaatctgtaggatagatagagaatgcatgtaacattgttcaattcacaatcttgctgtactctgcaaatacgatacctggatcgctatgtcggcctctacatagcaatccaggtcccaaggttggctttgaattctactttggcaacagagacattacaggctcatctagtgtccatgtcaaattatgtgttgaagctcttctctttgttataagcaaccgtactatatacctaaagcaataaagttgaacctatgattgttatggtgacgctcatcctgagcagtaggttgacgtagccgcagccagtcaattataaaacttgcgcttaaatgcaagattttaggcgtctcagtgatgatatacagtttccaaataccatggatttacatgcgcctactagctagtaagtcacatatcacatacgatattattgtaagtagatttaccgcccgccagaccgagctctgttccaggatgatgcatctggcaaccatatctgccgagcacatcgagatcacccatggaaacaatcttaagctcatcactatctcttttgcaaatctgcataggctcctatatccaatgctcgcattgcttgaagctcgtagcctcttgacttcaagatgggcgctctagaagacttgcaaagagtgttcatggtgatactcattcaacatactttcatcccttatgttagttcctcaagtttataaggaccacttcatgaaacgagccgacacgggttactgcacagtggaataaacaacattctgcaaacacgttctgcgcaacagggtcaatgacacctcaacaaaagcctgagtgacgcgatgacatcaatcacatacttatgtagacaacctttaaattctgcggactattctttgcctggacaatgtcttccaggatggaattacctaacaaaggtccacgaagaagccgaagctccatccattccagtttctgcggctcgttcgtcgagagtccgacccttatcaaaattacgagacttttcggccaaatgcaagcagccagacggagcttgacagaagcgtgctttagaaattgttacaaggtctgtcacatcttcactgcagtatatgatacccaacgagctcaaacgattgatttgtacgcctttttcctgcggttaatgccacaacatgggaaacatctcttcgctaacaagtggctggcgagtcaacagtgatgcgtgtactactgatggtgtcggtcgctatttgccttcccattcaggccagtctcgacatttcatgcgaggtgcgctgcggcgacgtggcagatatcctgtcgtcagcgcgcgcgctgactattccgaaaattctttgtcatgtcatgtcgtaattcatcgagagcttcctgacctggtcagctatcatacacgcggcggcggaagtgatcgtgaatcctcgatgagggctcggctatgttcctcagatccctgagtagacgatgctgatctacggcgggtcaacttgctgagatcgacatctgatcgaggtcgcggggaagtcgtgtcatcatcagctagcaatagcatcacctgatgattcagtgtttcgttttcctggcgaagatcggcattttcctgctcaatctcgccgatggaacgagtacccagatcttcgctctggtaccgctccaactcattcttcgcgtctttcagctgagcttctgcttcacctgctcgtctacgggttatttccacttctttttctcgtccggcacagacatctcgtagagcgcccagttcttcacggagaccctcaacctgtcgttgtaaatcagcgttctggattgcaagccgttgctgttgtcgaggcgtctcgccatcgatcgtcggtgtggctcgtcctgacaaggcggatctagtcctggccccagcttcggttccatcggtgccttgtgcagcgtccaaatcggcttgcaacgccgcgttcgtgctcttttgtttggtcaattcgtcctgcatagaagccaaaatttctagtatgaacagcgatttgagcgaagtcatggtgctcaccttcattctacgaaacaccttttcagtacctctgcacagcatttaaaaaaagaagatgagtctctgtccatttagacacagctacgattccgcatttacacccacttgacatagcgaacagcggtttggtaatcagcctcgacctgttgcaatttcttcttgtgcgtcgtctccatctcggccattcgaatttcaagctcccgcacttcgttcgaagcggtgccttttgcatggtcactgtgcgcatctggtgggccgctcgggatttgacccgcttgaccagtatttccctgcttctctatcagcaggttttggacccgcttcagttccatcctcatagtttcgagtgttcgagcctgctcttcactctgctcctgcatctgtttcgttgatgacccgtgggaaatgggctctgcggcattgtccgaagcggaaatcccatggtctgacaacaatcttcgaagcaagtcacagcgcagttttagatgcgatatctcgtcccgaagcttttgttgttcaccgcttcgagaggctgacgattgttgcaagttagagatggtctcggtgtcgatactgcgctgtctctggcaagccttcaattccgtttcaagctttgcagcggatgccctagactcttctaggtcttgccggtgtcgcatcaagcttgtctgaactgcctctatttgtgtccctgcttcattgagcattttgtggagagaagcacattcctgagagagtgcagctgacttctctggattgtccgcccgttgacttgacagggacctttctgcagactgttcgaccgataggagttgattgaaaccgccttccgccagcctgcgatagtgctcgagctgcgtccgaatagtatgtacattcacgtcggcttcagtagcacgttgcagcactccggcggcagcctgtttctgttccgcaaggtgagctttggtttcttccagctctcgttcgagccgctgcgctcgatcggtggccgtatcacaccttctcgccagatcctcactacgctgttcagcggcactcaatgccgagcgcgtctgctcgattacaagcaagtgggtgctgcgctccttccgcaagttcgctccctctttctcatggctctcgagatcgagagcacgttgttggaggtttgagctatgagcggcattctctgccatttgctctcgtaactgcatctccagtcgactcgtctgagtttgcgctgagttgagctgtaacctcatattcctctctttttcctcagctagttgtgctctgtctgacgctgcatcaccgtttgccttccacatatcgagatcgctagcaagacggcgcagattgttttctagctcttgcacctgactctccgccaatcgcttgccatgttgtgacgtggccaggtaatcctccaattccataatcttctcgcgatccaagtcggaaagctcggtgcgactctcgctttctagaatggctagacgggccctcagatatacagtctcctgcaatgctgcgtccctctgccgttccgcatcgcccagctcttccagagccaagtcgaccttttcaaacataccctcctgcaaacaagttttcttcagcgctgcgctacaggctggctttacggagcaaggttaccttcaaacgcgagcaatcttcttggagctgtagtatttgatctagcaaaatttcggcgttgatcgattctggagtctcaggaagttctagagccgtggcctgcacttcgtgagacaaatgactttcggatgccttttccagcgcagctcgcagtaccgtattctctcgcatgattcgtgtcaagtcttgcgaatcaataccgcgcgaatattgctgtatgggcgtctctcctcgattcgaaaaaacggttccggtcggtgagcgtgaaccgtagtaaaaggcgtccgaaggcggttccttggccatgtgtccaccgtagcctcgcttaccatgcgcatcgctgatgatggggctactgggaagtacgttgattgcgccaccactgtctaatccagacctagccccatcaccgtcaggcgcatcttggaagggtcccgacggcgagtccgagcgattgccagctgtattatgaacgaaagcctcatcgtcgactcgtcgagggcgaaccggtggcggctgcaccgtcggagtcgtggtgagattgcttggcgagctatcgcttgccaggagatgcttgtgaccgttctcgcgatcaactggggacccatccagccggggtcctggatgcatagctgtctttatagagctgggagcagcagtatcaccacccagcgaaacaggatgcacatccgtcccgttgcgactgtgctcttgggcgtcatcacctcgagggcgggttgttggcgcatgactgcctttgtccagtacacccgcggcgtttggcgagacaggcaagactgcgcttcggggtggatcgggagggtatttgatcttggctgtgaagagaaagaggccgttgaaacaggccgttgaaacaggcttagtcctaatattgatcacagggaacgtccggtatttctcaccggtatcgaggacgtgtatgacgtttggatcctccgtgcgtgtctgggcgaatgcggcgttagaatccccgccaagaacgaaaatctgtttcccaaaagccgccatagcatggccactccttcccgatggagctggtcccatattctggaaagtataccatctgcgatctgtagtgtcgagcaagagcatagcagtatggcttaataatcgctcacttactcgaacctttcaagtccaccttactcgtgaatttgaacgcggcaagatcgccaagatctttccccccgacatcgcgtcccccgaacacgtacatcacatcatcaacgagggcggccgaatgtccctctcgggggacaggaatataccctatgcactgcagctcggtccatagacgggtgtggagatccaggcaccatgtgtcgttgtagtgaaaagctccatcagttcctccgaacctgaatgtcgagcagatgaatccggtaccgccgatgagattggtaactttcgaaagcccgccatgccagactcacatgtagagtttgtcttgataggtgaccagcacatgaccagtacgaggggaaggagccttatttgcaggttgaacaacatgccaagttggagctaccatcactaataaacgtcgtggcgagcaatatggtcaaccgccgcgatgggcgggggtgcatcctgagataaggctcacacgtgctgaggtcgaagccccacaaatcattcatgaatctgccatccacttgtccgcctgagacataaaacgtgttgccgctcatgcagacggcatggccatatctgccctttggcctggttccgagcgccataattcgagtccattctcgggtatctggagaaatcagatcgagaaatcaagcttcagtcagtcaaaagaggctggtatgaagctgtccgtactcacgtatattgaaaaggtatatgccctcatcctgctcgtcttcaatccgattcttcgtgtccccgccccagacgagcagaaccgacctgacgagagcgctggcgtggccaactcgtggtactggaatttcgcctgtagcctgtacaggtacagccgagaaatcttggcaatcaagcgcgaagaggtcattcctgaccgattcccggacgagacctccaaaaataagaaggtggccggattgcgtaggtacgggaggtagagaatgcccgtatcgtggaaatggggatacgagagcgcctggaggggagccgacggtgttgctgggagacagaaccaattgccgggttgaccatggatactgtttgcgtacgtgggtgtgtatgtgtgtgcgaatgtgtgtgccgttcgaagacgatgcctcagcgcagggcatgcagagaccgacggcttgaagcttaccgaagggctaagtgcggcagatggtttctgtaaagcaggacccgagtcctgatgtcccgcatgtccctccgacgtcgtcctgacatgctgaccacccgagacgttgggaccgtcaaaggacgtttttgcagggttccgcgaagaggcgtccgatgtctgcctttgactctggctcacaagacctgccgatggatgccggctcattctaaagcgcaagtgccagataccgcattagattctactatcaggtcgcatgtatggcttatgatacgattgcttacgcttggaaggactcgcgcggccccgaaccaggtgcggtcttgctgtccaggctctcatcccgatgatgttcgctctttctcttgaaaaagctcatcgatagctgaggccgactatgaatgtcctctgatacttgtggccgggctgggcagttcggtaggtaaggggaaggtagataggtccaggcgagatcaaggtcgggtgagcactacgagttcttgatgatctgctgttaaaggtcccgaagatggaactctcgatgccaactcgaccggatccgcttgagaagaggagaggtgggattgggtaccgattgaaatcgattcgtctgatgctaagtagccgaaatggatcgtcggtaattccaacgtccttttcgttcagtcccttgttcccttgattgtctgtgtcgattgcttgttgtcgattgttgttgtcgttgttgttgttgtgtttgttattattattcttgtgttaatggtggtttgacgtatattgtctcgcaacggtaatgcatcgccttccgtatgaaggggagcttgatcagcggtgatcgttgacagaccctgtatacgaccagcaggggggctacaagcttagggcttggaattggaatgcatgccttgaagtcgctgaacagtcgccatcaggtcggtccttgatccctggacgctgctggtcgcggtttgatggaccggtcgcgcgggaaacacgtaataatcgattcctcctttctcggtctctaccagctaccagctaccagcaccttttagccaggatacgcgtcgcgcgcattccaccgacattgctttgctctgcctgcccacggatcgatccagctttgcctgagtcgatccatagcattcattcgcacctactcggtcttttggacctgcaccttgaaggagcgctatctttggacaggactgtcgtaggcgaaccttggaagcctgtcgagcaaatcaagctgttcagtcaatcctcggggtaccgtaccaagtgcacttatagcgatctgcaacggttctcttaatcgcctagttgtgattcaggcacacgcgacgcagttacatctatctgcatttcagtacacctggtagcttcgctatcatgcgataactactcttcgacccacgatccacacgaaatttgcgggaccgaattagcctccaagattcgggcactggccgtgaaaatcagcaaggcccacaatgtccaggctaccactagctcttagcatacctcagagcggaattccaccagcgtccgcgtctgccgaccggaacactccactcgcccgactcgccaacgaagcatcagagaacgactatgatgccatctgcgtgcctctgaccaatgatctatggagagaaaggtgggaacgattatgtcttcggccggtggaagaagacgacgagaatgaagctgcatatcacgggaaggacaactccgcaactcgacaatggcttgaaaaggagcggaaaaagcgagagacggaaaaggaagccgagatgtggaggtcgcatggcggtttcaaacgaacggaactcaatatcacacgattaggtgcgtgatcgagcacgcagcgatcacttgaaatgcattgcgaaatttgacacgcgggactgattgcttgcagaggaggccgacaccgccatcgccctagcgtcagactggctcgaactagactctccagatgaagggattcgtttcgactctgaactagtgggtaaaaagagccgctacctgtgcccggctcaggaaaatatcctatacacctattaaaatctcatcatccaacaggctctccgtcaagagctcttgacctgccttcacctacacgtccgcactctcgtcatccctcctccgctgccagaaaaccgagagtatctgccttcctatgctcgagccatagcctcacttttggaattgggaggcgaggcaagcgtgactcgtatcgcgatccggataggagtttcagatcgacccaatcttggcctgcaaagtaccgggtcgcacaacagctattctccgcaacagccaaaccactctgctcaaatgttgcaggatgataagaagcacaaaagaaagagctcgatggggattgggattcgaatgagcgggagtagcgctctcctctcctcggtccagcagtcgggattgagtcaggtatcgaacagacaaagcatggtcgtcggcacgggagaccaaaactcattcagttgggaggtctgggattgcgtgagaaacgtttgcgattatcacccccgccttggtcttggtgagtcctaaagtctggatcaccgaaatcttcgggcccgctaagttccatattggcacccatttagcactcgacatgtctaatccattgccaccttcattgacgactttgcaaaggtggattgcggagccgaccgacatcatattcctgccgtcacagtcctttatcccaaatgccaagggctatccagtgttgagtaaagcctgccaggctttcattcgaagcttcgtccgggtcagtgtgcggtatcaattgacgctatcctgccttgtcgctgatacccaatttgctcccgtagctttcaccgtatatcgtcttgtcccatgtaaacgccaacaaacatcccgctggcggcgcgcaggcgtatatccaatacgttcgacacctcgagacgacagccatgacgcagccctctcccatcacagctcctcagacggcagctaccgggatcatgccccacgggcaccattatcaacaatatatggactacctacaagcacccttgcaacccttgatggacgatctcagcagtgccacatatgaaactttcgaggcagatcctgtgaaatatcgactatatgaagacgcaatcactgcggccctgactgatcgtccagaacatacgaccaggtgagatgacatttgaaacgcctatcatgacagaacgtaacatctgatccggtacatttcagtgtcatttacgttgtgggcgcgggacgtggaccgctagtgcaaaggtgccttaatgcgatgaagcgagcgtctcgtaacgcgagggtgtatgcgatcgaaaagaacgcgaacgcatttgtgacgtaagtgtccgtggtgatcatttctcacttgcacaccgctcatgtgcgacgaacttccggcgcagcctgcaagagcgctcggcgttggaatggggggacaaagtcaagatacttcacggagacatgcgaaccttggctgtgcccgagccggccgatatcatggttagcgagttgttaggcagtttcggagataacgagtcaagtcccgaatgcttggatggcgctgtgcggtatctgaaacgtaagcgccgaatccgcgaagctcaggtgtatgcgcaaactgagtcgactttactttactatctcgcgggatagctgaaggcatctcgataccggcctcatacacggcgcaccttgctcccttatcatcgaacaagttgttttcagctgttcgactccagtcagaaaagaggaacaagacggaagaggtagcgttcgagacaccctatgtcgtgatgttccagcaagtcaatctcctaagcggcaatcaagatcctaatgccacagtggcgggaagtagagcaggaccgcgaattcaagagtgttggagtttcgagcatccccggcgagatatggtcacggacgatgcaggtaagtccgtgtctgaccatttagccagtcccttgctgagatatcgcgagactccacccacgcaggacttccgcttaccaactcgcacaatactcggtccgctcatttgacgtttcgaataccccacgctggggcctgccatggtctggcaggatactttgaagctcatctgtacggcaacatcggactcagtattcatcctgaacgaatgcatctcattagccctgagatgatgagctggttccctttgttcttcccgttccgggtaagcgccgtccttttgcccttcttccgaatgagcgactgatcacgtaggcgccacgaatctgatcaatataggaacctttgtatatgccttctggcgcagagctggatgtccatatctggcgtcttaccgaccccaaatccaagcggatctggtacgaatggcacgcagagtccttccttcctataaccggtacggtgaacggtatggttacgcctggcttcaacgggatgaacggtacaccaactggcagcgggatgcacggcagtcgagtcgtctcaggagccagctccaacatgagcgtgccccttcatagtcccatgatggacgcccctggtagccccatgccggggagtgtcttcggattgcagtcgatgcacggacgggacgagtcccgaatcaagattgggcagacacggcttcataacactgccgggaggagcagttgggttggcttatagaaacagaggatgcggaaacagatggacatactgcggttgtcaaaggcacgagccaccatcagactatacatcccacatctgaaattaccgtctcgtgtaacatgaactagcgttcgattgcatttttgcggcgctctctccaaactcactcgatatacgtcttcaagaagctgtcgtagtcatgtcgatacgcctctgtcaagggtctatagcctcctccccatagagtttgtcaattagcctgatggatcgagtaatcaagtagcaagtaccaagtgacacaagtacacaagtgcagagtgaccacttgccacttgccactgtacactgtagcatgaggtttgcaccttgaaacttgttgttcgaatctcggttgcgcatttcgggatgcacgtgttgcccggaagatttcggctcgaccggaagcaatcaactcatccacgggaatcgtacggcggatcaggtactcacgtatacacactagctagggtctgttggtggagattgtgttcacgtttgtgtgcatgacatacctgctatatctgttaagatctggaagtttcatagctctataatatagcaatcgatcatcacacccagtggatgcctagagcgctcaaagagcatggtgtttggtgcaaactcaccaatacccgaagtggactgaagcataaaccttcgtgaggatcgctcattcaaacacctataccaaagggacgtgcaacagaatgaaatacagtaaagtgcgtaggtcaagccacccaagttttgcttcagatcattatcttacagcatgcttggttacccaggagtatgacaacatcatgaacaccgactccttccccccacagtggagggagtcggcgatcgagtatcgcaaggtaagaatgcagaaggcggcctcgcatacgcctgaagtactgataagatgtctatcccgcgactgtattcctcagctgaagaagttgatcaaggatgtagccgacgaactagcagcccttggactgaatcccgaggttttacataaaatcttaaagcccgaggagcttcctaatacgacgatatcgacagccacaggtgaagccgtcattcattcgccgacacctcggaaaccccgccaatctagtttcacactagactcggccttgttggatcaggaaagagagcggcgatggtcggagtcacagcgaccgcgaaccgtcagccctggacatgaggccggcaacgaatcggacatcgaagagctcgaattcgaagtcgatgagctttccgacttagatacgcttgctgagccatctcatggtaaacgattcagactgcgtttgcctagccacagctcgactgttgatggcgagccggtaaacgacgcccaggctttgcatggcgaccatgaggccccagccccacatggtacaggaattcaagatgcgcgaatcgcgagagttaaagctgaatacgtattgtcaggtgggattgcgttcgctggaagatttccactagtcatacctgagcttatatcttgacaacgccggcaggacctacggacaagccaacgccagagatcagacttttcctttccccttcgcctcgaagcgttactccttcaaagggctacgatctaagcggttttgtctcggcgattcatgatgatggtggcgatggagacgattcatcgagcgctcccagctcccgtctacattcgcggcggtcgtcaaagtcttctcggcgaggttatgcgaccgagtcagtctcatccgagagcgatggggatcacaatggggattcatcggcggtacctcgacggatcataccttcttctccacgtttggaaaagatcatagaatcaccttctccgatcttcgccatctcgaacggaacccaaggacacggtatggaatccctaaaagatcagctcgacgatctagatcttggtgacgccgccctggatgatctggatgagttggatgatgactcgatgaacgaacctcagatcaccaacgaggatcataacagcgaaaattctgagcatgccactttcaatgcagtaggccggacagtctcagttggcgaacgcaaatcagatgatgtactggaaatgcccctacgcgaagacaacggaagggagattgtcgtttcccttcccgctgatgtcgccttcttccaagtgctctgccaagcactagtatcactgtccgagctacacgcaaagcagcaacagttgttcaacactgccgtacaacacctttgtgcgttggtgtccagctccatcgtgcctcaaagcggcggcggcatcatccgaaacatacacttgcctgctgggaagcgcaaatcggaaagcaatacgtatgaccccgctcatacgccaggggcctcttcttaccacaagtcggatctttacgtttggcgcgagatcttcactttgtggatcgaagcacagatattcgaatcatctgccgagcgggacagaggggagagatcggtcgaacaagcggacgcccgtctcaaagctttcgcatccgaggtagtaaagcgcggtctcggagatcgacgtaccttgaggaggaaggaaagccgcgaagcttgggaagagttcttgaggctgaatgttctgctgctggatttgaaaaagtttcaaattgcgaacatcaatgcggcaagaaagtaggccaatgacttcttgggtgtcattgtgttcggcttaaggtcgctaaacccgcgcaatatctgcaggatcctgaagaagcacgataagcggaccgctctgactgcatccacgggatttccgcagtttgtgcggtcatctctcgatgctcacgtggatgcgaacggcaacgtgaagacgtgggctttctactcgacttcacttccgcatgtccttcttaccagcttgacggaaacgctgttgccaatcttgccaagcttggaagactatacttgcctcatctgcaccagtatcgcattcaagcccattcgtctaggctgcagccacttgttttgtgtccggtaagcacatgtataccatcggcagtgtaggtttagagctgatgggtcagagttttagctgtcttgccaaaatgcagagggcgggagctgcagagtgtcccttgtgtcgagcccgcacggtattacaagcggatcgttgtgagtctcaagttcgatcacagaatctctcccggccactgactaagtatcaacggctcagcatcactcgacacggaaatgcagcagtaagcatgctgccggctggtcctttgtactgacattcacactgacaatgtcggcgcttccattagtttcatggaacagtggttcccgctggaagtcaagatgaagcaaaaggataacgagctggaaattgccagatctgatcaacacgctcatataggacctgacgccaagtgtaggattatgtagatgtattagtacaaagtcgttaagttgtacttgggttctgagtcaaaatcattcagcctcgcggatcgcacaaaacgcccgaaaccttcagctagtgcgttgatgctgagcaagaatgccagacaactctttgtggaaggcttcccaatcttgcaccaactgaattgtcatgtcaatccatttcagcgagatctttgacggatataagaccatgagacctttccacccacgttgacttaccttttgttgcgcatccacagcctccgttatgtaagcctccatcgtcgatttaaggtcttggatcctttcctgctcgaatcgactgaactcgagcttgactagccgcgacaccgcatcaaaatccgattgagcatccagagcacgacgatccgcctgtttgccagcattcgagaagctcagagccgggcttatgcgcgagcgaacttcgtggatcgtaacgtacttgtgcgatatcaggtgtatctggcccgttcgactcttgcggagcatatttaccgccttttttggcccggtcgcgttcggactgtaccctgacacgtctcgcctcgctttgagcattctgccaagcgaagtgcgatcggattcgagaggaaaaggccgcctgcaagacgatctaacagttgtcaatcgagctgggcggtatgacaaggtcttgtcgtatacatacccggactgaacctattagacgaagctgctcgtcggcgacgttcaacaaacgtactacgtccatcttagcctggttctcatgcatgagtcgttcatcctcgctaagctgggagaaccgttgtagcacttgtgacaatgctaaagacagatcggactcggccaaggcttgcaatgcgtctgagagagtcaagaatccgttgacgagatctgcgatagcctaaaggtcagttggattttgggggagcgcgaatcaaccattaccgatttacccagcctgtgtttcgagctcgcctcgagcgacttgaccaatgccttgatctgtgactccagcgaatcgaggaagtatttctgcttgttaaaccactagagatcacggcggtccgctttcgtcagcacgactgcaataggagcaaatcttgtgcattaactcttacatcgtcttgttctacaaaacgtggaccaccgatagatccaccgagagatgccagtacactttgcttctcttgagtcatttcctgccggcgatgcttgacctgattggatatgattggtcagtgtctacgcgaagcaagactatcaacgtctacaccgacatctattgcaaaggcgtcgctgcttaagaagagtttcagatccgggtccaaactcagcacaggatgattcgccatcttgcccaacgccctttccagtgcagatcttcgcgtctcgacaaattgctcctcaaaccggcctatcatcagtcatatcatcagtatgcaagcaggtgttaggtcaggcgtgctgactacttgccgaaagcgtgcttgtctggcatcggcgggacgaccactcccggattattgtgtgaaacggcttcgaccagccacaaaaagtcggagaaccttctcaagaccgaaaactctccccgcttgtaatgcggagaggtggtgcgagtcgtaacagtgtagacgatatagcccctgacggggtctccaaccttggtaggatcgctaatggatatggtaaagaccggctgcgtcagaaggcgattcctcgtcggtgacctgataggctctgttgcgccaggcagatccgcgtacgacgcctttacgtgcaagacgagaccagtcaggaatatacagggtcacattcttcgcagaagactcttacctgaggctcagactcgtgtgtttccacttgacgctgggcatacgggccagacggtcgcgttgtgttgtctcgatccgattccgattgccacgctggtggtgagcgcgggctatatgatgatccgtacagcggctgctgcggtacatgcgtctcggtggtccagccgagcggctctggaagctgttgttgacgagaagcggatggacccgatacctcggtgtcttcgaaggcgcgcccccatcttgcgtttttcatcgacgattccgtttgcggggaaaaagcttcagggaccggtgcttcgctttggctcgagccaccgatagctaaagccttgaagagtgtctcggtatccgccttcttatccgagtccaggggcagcggtgtcacggaatcagtctcaatagcgcgaggagagtgcgatcgttctggacttggtgacgaggctcgacttgctatcgcaggggaggcgactccactagaaggcaatgggatatgttcgggcacgacctcgttactatgaatgacctcgtctttatgccgtgcgatggtttcggccacacgctgcgatgcctggtccggatgactagattccaatatctgagccgccatggcagcagagacatgaggtccgggaggtgtgggcgaagcagcgtcccgagcagctttttcgaggacgctatcgccagccacaagggaagagatcggctcggcgtgttcgtctgatgctgctcctgttgtacctgtattttcccctgcgttcaaccgaccatctggcggatcgatctccgcgccttttgtagcaaggttctctgcaggctgattcgacgaaaccgcatgtccgatatccttcgagtcgccggtcttggcacgatccgccttctccctttcgtctcgttctcgctcctctttgcgtttggcctccgcagttgccgctcgctctcgttcttctttctccctcttctcgcgctctctctgaacgctgtcgaaactgataccgacctttttacgggcagcgttacccccgggtttgaagacactggcggcggacgccgggttgggcttggtttctgtactatcgcgcttgttgtcgctcgcgacaaaagctttcttcaaggaagacgtcgaagtgtcttcctcggagagcaacccgaggatatcagatgatggcctcatacgcgcgggcgaagtggtcccggatgcggccgccggtgggggaggtgaccgaggtataccatacggatcgtgaaacgatcgtcccggagatgagaatggatcgtttgaacgagagtacgtagcggtccgaagaggcgaggtcgttccaaagggagctgaggtgaatgtagggacctcgaatggggttcgcgcagggtctgtgattcctcgtggctgttcataggcttgcgaatctagcacaggcgagaggaatactgcatcagtcaacttcatcataccgaatttctctccttggctcctcgcatcttacatgaactgtcaccgaatcccgaacttgattctaccttcttgtaacccgtatcgtatcctgattgatacccgaaccccgcatcgttatctatcgtgccttcttccctcagcttggtgacataaggactggtatcgtttccagacgcagtcgactcgtcttgaaatccagatcccgatacggtagttggaaatgtaggtgcatccgacgaggcaaagggattggcgaaagggttcgcgaacggatcatcgttaacaggttgaggggtaggatcgttgttcgaggagaagcccggcagtccgacgtttgcggtcgaacgcagtacgttggcgagatcttcgtcgtccatgtttctattgtatgccgaacgagtctctcttctactgcatgtccagtactttatactgttgtgacaaagtgtgcgagaagccagcaacctgatgacctgatcgattcagagtaggtagtacaagttagagtcatcccccaccaactgctcgctcgtccccctcccccggcagcttgctacgcgtcatacgaccgacctgtagctgtggctacctacctacctacctacctacctacagatgtaccatatgctgattgacaatcacatcaccattccgaactcgtcttcagccaacagtgcgatcgcatagtaccgaacaagacacctctcgctacacaaattcattccagctacgattctttgaccaacccagcctagcctatccaagacgctcctttccgacgcaaaccgcaacacccaccgtccgcccatcatgtccatctccggtctcgccaatgtcgccatgcccaacattcccatgcccagtcagcccatctcggcagctaccaccagaatcctcaccctgtccaactttagccctcagatcaagacaaaagacctccaccaagcctttcaaccatgggcggaagacaagggaggctacaagatcaagtggatcgacgatgtgaccgcactcgccgtgttcaacgatgcgacggtcggtgagtctcaacgtgccgtcagcttgtcacttaccggacatgatcagcttatacagatgcacccaacttgatcgtcacagccaagcgcgcctacctctctcttatccttaaccctcccactgggctgccttaccctgccatgatcaggccttacgacggacccgacagctctgccatcatccactcggtcaacgctcgtactcacgggcacggaggtagccgtggaagctttagccaaactggaggtgcagcacaagctcgagccagtttcagccagcctgcaggacaacctcccttgcccccctttgccaactctggcacgagtgccacacagcaaccctttggcggggcgggtaacggtcacaagcacggccgatccgccagtctatcttccaccagtggcaaccacgaacgaccgaactttggcagcatcggcggtaacgctgccggttcgagcgccttcaacaagctgggcgcgggtggtgccttttccggctttgggtcgacatctggatcgtcgggctctctatccaatcacgtacgcaactcgtcgagcacgagcagcaccaacgtcggcggatcgtggggcagacaatcggctagtggcggactagccaactcggtggtaagccatcgtgacttcccgacatgtcgggaacccctgaagctgactgaaaaggatccccgataccaattgtaggtcagcggattcaacccgagcaggctcgctacccaccacgagcaggatagcccccagacaacccctgtcaagcctcaacaccagactactgcgtcgatcgggagcgcacctgccggcccggcttcggaaggaccccatccccttctccacctccctcagggcaacacccacgcagatctctcttctcccgggatcgatattttgggcgccgtcggccccgagggaggaccgggaggtagtgccggtttgttacagtgatctggcttcagtctcgactttggtttccggcttccgtccacacagagtctggacatgatcaaacaacatgtatcctttacggttctctatatcgtcacattgtcatacaatctatgcaaagcagtcgcctaagctcgtccctcgtacgacgtgagcgcgagtacaggcagttcgtcggtcttgcagaggcttcactacctagccctctatattttttgcttgataagtccactcatcaggtcgaaactgttcccatcgggttgcaggtcaacgtagcggtctgacggccgcgcgacggatgtcgagtatcgatcctcgtatgcgtcataagaggaggaaccccttgggcctccctcgctggtcgctgggacacaacgcaatagtccgctgttcagttcgagcgtcttgatgatcagaggcaggtggggcttgaccgtagtcagggttacgggctggtcgctggcgatggtaatacgattgcatcagccgggctcgtcgaaaacatatatacccctgaaactcacgtatgcaaccaacgcccggtgtactcgtcgatgaaccctgcaaagcctttttcttcaacgaacttgtcccagatctcctcgaaagcaacgagtattcgtgccagactgccctccatggttggaaccgtcaaaggcccggcggttcggttacgtttgtgggccagctcgtagagttgagcgagtgatgtcgtaggaagatcgttcaagatgttgatcccacaaccgacgactagatgccactctcccttaacgaaactggagttgaccaatatgccacccagcttcgctctgcctttcgaaggtgtgcgcctttctccatcgatgatcttctcagcctcaacggtagcaggcgcttgaccgagaccttccgcctcggcgtaaatgtcgtttggccatttgatgcgcactcccaatttcccatcgtcgtccaacccctggcagatcgctagagccgcgatgtattgcgcaaacaccactttattggaggggaaacctctgggcaatttcaacaagatggagaattgcaaacacccggcaggcgataaccactggttcttccctcgacctcggcctgccagctggaagctagccatcgaaacgtacgggagtggcaacccatatagcaaaattggattgctttcaagacgggtcagtataggtggccgcccaaatggggagaagtttcgactcaccgatcgagcatggtttgtgtgctgccgaccgcctctccatattggatcacgtcacccagactccacgagcccaatccgtccggaccgccgcccaatttccgcttccttccgacaccttgtctgcgagccgttgaatccaattcggaccagtagcgagcaaagtcgaatagcggcgtccattccggtcgccaatcctcgtgctttcccaagagtagggaaatcgatttctgctctgatggatccgcttcactagcctcgatgaggcgttgagcctgcatgtatcgcggaacaactagctcgatcgaggcaatgtcaattacatggaacgtatcgccggtatcgcgcagggccttgactgtgacttgctggtcttgcaaatcgacctgcgcttctgtcgagttggcatcgatttctggcaagccaatgatctgagcagggagatcagaggcaagctcgggatgcgaaaggagcatgaccggtagtgggcgtgtcggtttcagcaaggtcggatcgatagcctcccatcgagactgtgccacattgactggctccagctggtgcacatcaaggaaagccagggccactttgtaatacctgatggtcgtcttgacgtcgccctctgatgagcgggctagatcggtagtccatgcgacacatttcccggaagcggaagcccagcctagagcgactatgcgatcgtcgggatcgcgctccaataccgaaatgtccccccgctgcccagcatcgccatccacaaccaagctactagggcaaatccccgacggcagttcattcgaagttctggccatcgttcctgggaacaacaagtcgtcctctagcatctttcgttccgaaagatccgcaactcggcagagcaatgccgttgccggcccaacactccaaatcttcccgcctgcccgcgagtatgagctaatacgctctctgagaattgcatccgtcccgaccgagagtgcactctccgtggaaagtataatgaggagtgcacatgtccgttcccacggttctctgcggagtgctttgcctgtgatagttcccaccgtgtagaagggcgacaagatgtctttaagcgatcctaccatggccaattcagttccatccgcgtccgattcgcttgatatgtcgaataccagaacttgatgttgagataacgtcgacggcctcggtatagtgctccggagatgtctatctgaccctacgtcagtaactggtaaaattgcatccgtcgcagtcacgcctggagccccctcgtcgagtcgcgagggtaagaccacaccttcgactggggcaggatccgtcggtcggtcggaattggtgggcacatctccctgagcaatcgtatcggtccattcagtccgagattccattcgaccgcccgtatttgccgtggacgcccgatctacactgactgtgtcttgacccttgtgaataaccttagcaatcatcgaccggatacggttcggctttggtttggatgataatgacgcgttgccgacaggcgggctggtgttcttgaagaaatccgccagttccgccgtatccgactttcgagccgggataagcagcggttccgggttcatgttctccctagggttactcgatggtggagaagtatttctgaagaagtcggccaggtccgctgcggaagagcgtttccgaggagcatttttaggcacgacgttgccatcttcattgacaggggcatcttgggacgatcgccgtccaagctccccttgcccgtctaccgaaatgctcggttgccccacagaagtcttcctaggaccgaacgtactttccgagctctcagcgggacgtgaagaaccttcaggagtgatcgctacaggccgtcccagaacgggtatacggttctggtctgctccgttctttatctgaggtttgacacgtagctgcggtggcgatgacaccttggcttgttcgccccaggggggatctgagcgtaggacttcgttcagcgtcggctttggcgcgatacccatatcaggcccaggattgtcggacctctcttcctcagaactttcaccatctcgaggcaccaatttcggggaccggctcttttcgggcgaaactgtcggagagaccgcccccttcttcaaacgagtactattggatcgagagaaggtcgagctatgtcttcctagaggcgacccggtcggcgggatcttggcggtagctacgggtggagcagcattgactcgtgtgcgctgtccgtccatattccttagtgcccagccatggctcgtacaaaaacagctcgacttacatcaaacctttttagcctactgggtgtcagactgactttcatcgtatgcccgctcgtcaacagggcatcaaactcttcttccttggcagtcttgagttcgctccgggaggtggtaaagctatccctactgatatccacgctggtccgactgctgtggatactaggtggtcgtgaacttgtgctttcactagtctggcctgccaccatactggatcgactcgccatattgaccagcttacggggcccgtcgaacgaagcttgccccactcccgaacctggctgataagctgaaggagggcggtccatcgatggaggcctgctgccagaagatactatgccagcgctatatgacgaagaactggcaattcgctgaagcggctcggtgcgaggagagctcggtttgcttgtagcctgcgccggtgtggacaagatatgctcatatgccaagtttgcagggacattggcttccagggcttccttgactgaatatcgcgacgcttcagtttatggtcctggtcaccatctgccgagcgagactcaccccttaattgcttgaatagaccccagagtgtttcgccctcgcacagactagcgtagaggtcttgcgtttcgaccatgtttgagcgcgcgttgcgcatagcaaccttgcccagatccgccaagatcctctcgcatatgtacctttgataccaaggggaaaggcctcgttcagccggctgtctgggtgataaagggagcgatcgcaaactcactcaataatcgctgtaaggtaaagagatgcgggagtgacgatatccggagcggttgagccaccagccgtactccaagaccgcagcaaaatcttgtccttctgtgcgtcgggagtgtaatccgctagactctgcatcgttaggcgcccgatacttggcatcagtgattgagattatgccgttgctgtatgcttaggcgtaccgagtatgctgcaaccctagatctcaaaaagtctgcggcttccttggagggaaaggcaagctcgctaaatccggatcgtagtcctcgcctgtcttgttggaatgcatccttacgacttccagcttgagccgcagtcttccacgccgcgagctcgagttcagcctcattgatcgcatctcttgccagagattttgaaccggcctcgtggaatgatgagccggttttcagaggattcaacatgactttactcgactgtccattggaagatgttgaagagtttcttgcatgtgacttggtgatagcactaaaatgcgagacgataggggttgtcgaggactccgctgcgaataatgccggtactcccttaagcttgacatcgtgggggtcgatactgccggctccatccacgatgctgaacaggatctcgtcgagaattaagttgatatagctcaggcagtctgccgatacccgagtcggagcaaggtccgagacgagggcgttggcggtcttctcagatatatattggttgacactagccatcgagacagctggcgcccggaacgactcgttcgatccagcaggtgcacgtttaatagtaataggtcacgatcacaacgatctagagctgatggggaaagttgggaaggaggattcatacgagagaagaggtgaatctttctgctcatgctccccggtcgcccgggtagtcactgttagctatcggttgacgcgctcaaatccgtacgcgaggaggaccgaatgacctcttctgttttgggttgtaatcgatcacaattccagacttcgacgtcggacgacccgattccatgacaactttcttgatcgtacggaatctctatgagggtatatatgcaacatgaagccaaggcgaggcacctagagatacaggcgacgatggcacgattgccgatacatcgtaggtctaatttcctcacacaagtaaatgttctggtgaacgatgccagttcagaggaacgagcggcaagccggcaatatattcctacgtgtctacttcaagaactcgggattcacgccttgttctgcggtataggtaaacatttccgcagtacctcctgcgtgtatacgccaatcggtgacacgcatgacttgcatttctctgacgcaagttcacatgcgcgtcaatacaggcggaagtcagcgtttaggaactagtctcgactcacgcaagtttcaagtcttttcctagccggccgatgatgtagaccaacgaatccagatcatactccacagaagcgcatgctgcaagaccgttgcgtgagactgagccatgcaacggccccgagtcactgaacttacccaaaagatctcccacgagaacgctcaaccgtttcaattctttaatgagaacacggccagcccaaatgaggagcatgcacacataaatgtccgccttgtgaaggtcctcatccggcatggcgcgggccagaacgaccattctgcgggccacctgcaaagcagcagtattttctgcatcctcctcgtcgcggtcttccagccatagctccgcaatcgcgatgtagagatgctgcggagaatcaggacactacgttgagttgccatgttcctcatactgcttagaaaacggtcttaccagtgttatctcatgaacatcgcagtgctgcctatagggatgcagctgcaatggattctgcagagctgttgggagcgacgccacgaacaccttgagcgcgtgcttatattgccagtagagcgctggctgtcgggtttgtggacacgcgtcctgtaaaaagcccggtggtataaattggtcttgtaggcctccattcatgccacgggaactcatgcacatagatgtgctttctacagaggtcaatcgcgcgatttcgtgcatcaagacgctctgtacgtaacacgtcagcgaacgagatccagcaaagcggaggatgcacagtgacacatactgccctgaccgaaaaaagactattatatcgtttgaccaaatccatcggtcaatataatgacgacagtctcggagaaatgggaggcttgcctcaagtgggtcccgaatgcactgccattttgtcggccattgaggatatcttcgaccgtttgatcgttatcaaccgtgagactctaaggacgattcagtcagcccaagtccgttttgcgcgtccggtcggcgtcacgcacaggctctttgtaggcccacaattcgtgtggaaaaggggtcgtgattgactcgatgggcaaagcaactggccatttcatggcggtcgcgccggcccgatcgttgttgaatacgccccagctggacgtggagggtgtattgagcatcaactgggatcactggttctgacgaccccggcttacaaggtcgctatgcgctcgcccaggtctatcggatcactaggaggtggtagagcccagtactttgcgacacgtggcttgccgaagctgttcccatgcatctcgccagttccgtcggggtagtccttcaatacttcttcaaataccgtactcgagatggcgtgtagaccgcatgaggtggctaaccgcgagctcgtccccgtcatgacataggcttgtatgtactttgcgcaaccgtacaagtagccagctaagaggttactcgctctgattgcgtcaagtaatctgtcgctgtcggtgatcgctttctctgtaagtgcaacaaggggtttagcgaaattgctgtcgcaaagggttaaagcctcgtgttcaactgttactaaccaaactgctgctttgcgacatcgaaaaaatgatcccgcaaactgagaaggcttgggtcgccggaaaatgctgcgccgatcaagtacttttcagagcgcatatcagccgatgggcgtctgacatgtggaaatcggcgtgctcaccatcgagtacatccaacaaggatgaggccgtttacggggctcgagggttaaccgagttctcaagcgaggcatatcggttccaaggaaataattgcctgctttcttgaaaaagagcccaagcagcttgtcccgcatcccagacgggagatcggtactgtcatgccatcctttgaccagccgagattcggcagggtctggtagtacacctacgcccaatggactgttgctggtggcgaacgattgggtatccgaactaaaaacttgcgggatggaaggcgatacgtaatcgtccggcaagtcctttgaattctcggtgggggatacggtagtgccgagtctcccaatgctttccgccatggcgctaacagcagcatcacttatttgagcattttgcgtatcgtaattatatgaagcttgagtcagaccagtagtgtcgctcgacatttgcatttgttcagtaatcgtgtggctaaatccccactcttccgccatcccaaccggctgttccgtttgtgagagaaggtcgttaagaatctgctgcgacaacggcgagagcaagttgacggcagcaaaagattcgtctgcttgcgacagattcgacccagacggtcccgggagaatgtgatctcgcacgttcgttccagatccgttcaagtcagattggaacgattggtacgtgctattgtgcgatgtctccgagactgatcccccgttcgtatgaaatggatttaacgggattcgagagtccacctcttgattctgtgctgtttcatagcgtctcgcaccgaacgagccgctggcgtgagcattataggttatacccgtctcatacgtcggatggctattctgagccgttgtgggcatgccgccagatgacaatttctcttcgagagcagctgaaaacgggcgagaagatgaatcttgagctcaaaccccttgtggtttagacaagcccgtcataaagagggactgaccgattttagcctccagagctttcatcttgctgcccgccttgctcgatggaaccgagctgtcataacgacaatcctgcctagatttcgtacagttgtagcatccatccttgtttgcatcacacttcatctttcgcatgcgacagcgggtacaggcattcccgctgagtcacgaagaggtcagaagaaagtttgggaaatcccgataacacctcggctcaccgcttaagaggcattgctacaggaatcggacgcaaggcggtgagttacgcaactttacatcatgctgtggttattgacttacttctggtaggtttgccagcttcgctgggacccgaatccccgtcttgcgtcatgtcagagccgttcattcttgcaacacacggctttcctcccggtcgctgcagtcgaagttaggcgggggtttccccagaggcagactccagcaactgggaccaatgtgatggatatgaccgttttgaaagaatgtcacagcgtcggaagcatgagaggctagaggtttcgccctaaagagcttgaagtaacaaggttagggtgcgtgcgaggtgactgattctttctgcacacagcaatcgtgaagggatgatgacttgcggatccggccgaattcagctcggcacggcatggcgcacgcggaaaatgccgtaaggactgtggccgagactggaatcgcgacctcggtcagtcgggttggggaactcgagatatcttgcatgtcttggtccaccgggaatgatattcgaaagataggccacatcacagtactgaaagtagcataatattgtgggaatgtacagcgtcggacgatagatatggcaactagcctttcgaacgccgttgtgacagtatccggcatcagtctcgacctgtggtgacccgaatttcgccgtatgagtccgtttgctcaacgccaatcaagctcttcgtggcaagcgctgtcgatacgataggagagctcatgcccttagtctcttgaaaatgttcaaggttggaaaggttaggagggagaagggcgtctacgaatgcgaggtgaaagttcatcagaagggatcgcccagtgcgagggacaaaagtaagacttgccctatactattcagaccagagagcgtggtgtagctggtttgaatggtctcccttggatacgatacgggtcgactcatcgctttgaacttctgaccatcaccaggccaccactatcgatccatcgatgcatatgaacgaccgaatctcgctctcggaagcttttacgcgccataaaaggtcaattcaggaaggaggtcgactggttgaaagagtcgtttgaatagtgattcaggacatcgttggacgtcggcctatgcggcttatggctacagattggccaggatatattagacatgaaagaagagatcgatgcagagaaaccagtttgacccttgcgtgaatcgatgaatattgattattacactagtgggatttcgcaaagactgttcattttacaactgttccctcgtcagactttcgactcagtgttcgttctgccttccagcatcgggaaccgaaggcttggctacctcgccgggggtcttcttggtatagtctccaacctcggccttttcaggaggagctgcaaacgtctcgggcttttctccctcgccctggagatgtcacacggcgcaagatgagcatcggaaaaagagaggcgtgacacagaacgctcgaggttcgagcccactcaccgacttggtcgcaaagccatgctgattttctgctgcgctcattgcgattgaaatttacgtcttgtctgtcggttcgtctggtatatacgggaccgacgttgtgagctcgtttgggaatcctcgacgacagtcgagcgcgactcactcgttgcaaagacgtgatcgtgcgttcagtgatctagtgatcagctcgagtgtgaattccgaatcagtcccccggctgtacacatttaaatagacgtacagtccctccaatcctcgccttgacctagtgcgaaccgcaaatgtcgtgacgtcagcgggcacacggtcagctgtcacagtggaccatcgactacgtggccggataatccacgatcgatcccgtacggaccctgctcatcgggtcgccaaaaggtcgcccgacccattcacttggtagtcaccccgcgctcaatttattgtggtcctgcccgtccctccgacttgccacggtctaggatactgaagcgtcgtaccctggtcatgttgctgacgaaacggcacaatcgatcggatgaaacccgacggaatcacgcgggcattcgagtattctcgaaacaagcgcaagtgggggcacgcatacgacatcgcacaatccaatagcgcagacatcggcgtcactgctcgcactagtttgcgcctgaacactgacgccagcgacagtgcagcaagatggccgctatgagaaatcccgttggcgaggagcagtaaggaattcatagaagccgtgtagagttcgcagttggccagctagggaccaagaggaaaagattcgtccgaggagacgatctgtcgaccaacgagatatggggcttcaacatcatgtataccgcaatctaccctaccgatttaaagcaccgtgttgacgacaagtccattttcgttgacgttgtggcaaacactgcctcccaatccgaatccagatggagagccgaccagaacccttgcgactcctcgactatgacgcaccgtgatgtccagagcgaaatgcgcatgaggcgggttcattgcaacgggttcgtgtggtgaacgcaggtcggactaatgtgatctgaaggtacctacggggttcatgacgacgaccaacttctccgactgctttcgtgctcgtccggcatctttgcggaaatcgattcgctggacggcgctcttcaccgcgatcgtccctggcttttcgttacgagactttgtgggattactgcgctcgagcaccctcgggtttctctggggtattggatatgcggcgctgaaccgcagctatactcgagacgaaacagctttagcactgatcgccattgtgaaaaggcataaagtcgaggacaaatcgattggtacgccgttggcctacattgataagtcgggggtgaatcccgttaccgttattacgtagaggaatccttgcgccgggtagttctagcgataagggaagaaagcatcgtgcgagtgatatcaagaacgaagtcaacgctgaagttgaagcgtcttgaatggctacaaactcgcaagtgaacacaggcagagaccgcccccgtcgtctttaaatagtgtctgaccaactaagacatgccacgtgctgccaggtaggcggtgttacctatgccagtctcaacgagattgacgatctgtcgagttgaagcttgacgtgtccggttggacgaggtcaggtcgagtactcatcctcaaacgggccgggctatgtggcgcgtccgaggcagacctcggctcgtcgtccctcttgacctgcaatttgaatcccgctatggaccgaagactccccagcatgtgagtttcagcgagcaaggataaagtggctcgatgatcgacctcggttggtgcggtgaggagatattcgcaggtttccgtggcatacgacgtggatgttcatcgtctccgctcgacatccgaacatctcggttagtctaagcaagagcctcgtcgggtcgcagcgatggctcctgggtggcttgcccctcgtcctgaacgggattcgccattatcacacctcctccaaatttttgcatgcggtagggcgttttgtaaagaccaacagttgctatttgacgtcctgagacacttgtttcggtcaagcaattaatgtttgatctctcacgttcctcgattcctacagctgtccagcctcctagtattccacatactttgccgtttctcatccagatcctcacttagctgccagtgcctgttgtatttgggcgatgattgcctaccctcgtccgggctcggttcgaacctactactacatgcccgtcgtttgagggacccagataaaactttggatttctttccatgagaggtgtctgcatcaatctacgcgagtgctcaagcgcagagacagtgaagatccctagaccaaatatctacgacgcatcctaggcgttagttcgactggggaagggaaggaacatgactgctaacccgccactcacatatctcctctgccctactgccgtcatcacccacagatcgtcctcgtctttgttataagccggcttgtgttgttctttaccaggatcgggtcgcaaggatcgggccatggcgtagtcttggctgctgaatcagatggtgaagggacggtcgtcgcctacatagcgcccagcatcccgtctcagattgctacgatctcatcgtgattgtaccgatcttggctttctttgaaccgcatcgcatcgtctggtctcgcctcgcctcgcctcgcctcgtctcgccttctatctagctcatcgttttgatgaagggaggaagcttctctgtttcaactcctgatccgacccagtccatgggtttcgatcggtttcttttccccgcgaccgacggatcttcgtcgtcacggtccagcccaccgccaccagtctgtgttatcgtttcatcatcattccatgaccccctttcgctgttcacagtcgcgatcatcgttatccaggagattccatcggtcatcatcggttcgcatgcgcgcgcaagggatgggagagtacggcttctctgtctcacccgtcctttctttcacagcaacctttccggcaatcggcgactcgcgacctcgagatctccggtccgcaacaggcaagacctgattttcgtccttggtgggacttgtagataaccatcaacgacgacgacgacgacgaccgcatcgttatctggccaacttggctcttatcggggagtgttgggatttctgatcccgtggccgagccaatcacggcggatggctttatcgcgcgtggtttcgcgccgtcgcccatcaaggaaccgagacgagacgagataaggaaacgacgaagagtgaggaggagagcaggatctcgtgaccgaagccgagtaccgagcagggtaaagggggccaaaggaagagctcggccacgccaagccacaaagaaggagaaggccggggttgaaagagataagcgacggcggcgggtgagtggaggcgcgtttcatcaacgtagcatcagcaaaagggaggcggcggcgacgaaaggggaatacgggttacacaggggggaaattgggggttgggttgcttatctctgacgttggttggtatcactcccgagatatatgttgaccacacaggtgtgacacgcctgactctctcatgtaccgccaccaaagagccaagccaagccaacaagccacactacactcactttcgtctctcgaccgaaagctcttatctatcatcgcccccggatcactctatccctctctcgtctctcggttcatttcccgcacatcttcgggctctcgactcgtccttgtctttccgacccgatacacagcgacaaagggtgcaaggttatatagagacaccgacagctttcatcgaccccgtctccccactttgatcgcgacgtgtccactactttaccttgaaaaccctcgcgactgttcttcttccatcatctctttcgttcctttctgccggacgtccccatcataatctcacgctacgaccgtatcgaccctcttgacaatctcgacgccacacaatggtcaacgtcacctactccgagacttcgagcgatccgacgtattacatggcggatggtaccccagcgttgtacaacctcggggacatggcctggatgttgatgtgagtcgcgatcgacgccggtcgatcctctttgcaatcgcgctgaccctgccccgcctcgctttgtaggtcgacggcactcgtcttcctgatgatccccggcgtgggactcctctactcgggattgctgcgacgaaaaaacgccctgtccatgcttctcatctcgttcctcgccatcgccgtcggtagtttccagtggttcttgtgagtcggccagcccgaggtcctcggcacgattctcccgccgcacatgctgacctgatcatcaccatgcgtaccacagctggggatactcgttggccttttcagagggtgcggcgagttcccattttatcggcgacttgaaatactttgcgttccaaaacgtcctggaccagccgtccggtaggatccccgtgctcttgttcgccatctgtgagtcgcatcgtcatcccgagcgtatacccaccgggggcacgtcgctgatcgatcacgacacacgccctgcagtccaaaacatgtttgcctgcatcaccgtcgccctggcctcgggtggattcgccgaacgaggtcgactcggtccgatcatgctcttcatgttcgtctggctcaccatcgtctactgccccatcgcctgctggacttggaacgccgagggttggtcctttatcatgggcggcctcgactatgccggtgggacgcccgtgcacatctcttccggttcggccgcgctcgccatcgcgctctacctcggcaagcgtcgaggatacgggaccgaacgactcgcttacaagccccacaataccttcttcgtcgtcctcgggaccgctttcctctggatgggttggttcggattcaacggagggtccggcttgtccagcaacttgcgtgccgtcatggccctcgtcgtcacccagatgtcggcctcggtcggtggactcgtgtggatgttgatggactggaggctcgaacgcaagttttccgccgtcggattttgctcgggcgcgatcgcgtacgtatatcggttggggagcgccagacgggctgcaggacgatcagtgctgacctcgttgtttgggatgtcgacagtggtctcgtcggaatcaccccggctgctggttacgtcggtgtcgcctcttccattgcgtgagtccaccgagtcccgacgaccggacccgggcaagagtgcttaccctcgccttgttgatcctcgaaccctagcatcggcgccatcaccgccatcgccgccaacttggccacccgactcaagtttatcctccgtatcgatgaatctctcgacgtgtttgccctgcacggcgtcggcggtggtgtcggatgcgccctgaccgcattgttcggttcagcctcgatcgtgagtccaacaaaggcccaacgtgtgctcgctccacctgcctggcgctgacgcgacctcatggacctcatccctgctcaggccggactggacgggtctgctcctattcccggtggatggttcgaccacaactggatccaactcggataccaaatcgccgactcggtcgccggttccgcctactcgttcgtcctcaccacggccatctgttgggccttccactttatcccctttttgcgccttcgatcggccgaggaggaggagattgtcggaatcgacgagtactggatcggcgaatggacccacgattactgcgccgtcgatcgagagttgggcgtgagcagggtggacgatcacgcgatgatggtcgagaggaccgagtcgaggtcgggtagcgaggtcaagtcgggtgtgaacgaaaaggccagtagggacaccagcgtgactacgaacgaggtcaccgtctcgccaggcggatctcagcacggtttgcccgggggttcgagggtcgacgcctaggtctggcgggtctagatgatggctagatcggtatatacgtgactttgtgttcccttactttccctctccttgatccgtttttctttttgtatgatggccgatctcggatgatcagatgtcagacatccaggactatccacctcttgaccacagtgggtggtacatgccatcgataataatcataataatgatacgatcagaacgaccacgaccctacctaccatccacttctgctgttcccctcgcgttgcctcgcaacttttgacagtcaccgaagttgaaaaaagttgtaaaccaccccaaagtgtattatcgccatataataccgtacagccaactctttctaccgagccatacctattgacctcagtacctggtacccctgacaggatgagtagaacagactcatcatccgaagcaccggcacggtcgacgacatcgagaaaccctcaactccggtattgcgagccttactattacccataccgtaccaacgtcaaggcgaggtcagcttgttcaccccatgtcgatgttgacgaggtactcggctgaccccatctatacgaattactctatagatggattgggagacaaatcctcgaggtcatctcgacggaatttcgggatcgctccgtggaatactatgtcagtccggcgcagctcccgacgatcggccgttcgacccgacacacgactaaagcgaccgccttgctactgtatctgaccttgcactttgatcgtcgatgagcttccgtagaaacacgctttggagagcggggtgacgacggtcaacgggaaaccagctcgacccgacctggtcctcaagaacggcgatcgaatcgagtgggttcacctcgtctttccgtattcctctcaccctttgctgctcgactgacgagcaccggacgacgtcattagaaacacggtccaccgacacgaaccgcccatcactcgatcgcccgtgctcgttttgcacaaggatgaaccgaggcagtttatcgtcatcagcaagcccggctcggtggtacgtaccgacgacgagggacgtgcaagtacaaaaattgaagtcactgaccggacacccgtgatacgtggacagccagttcatgccaccggaagatacttcaagcacaccgtcctcgagctcctcaagtcggaccatggaatcacggcctatagcaagtgtcacgtctatggaccctgccgcccacgcagcacggacacgccgagctgaccacgatctttcactgctcgcaggtgtcaaccgactggaccgactgacgtccgggttgatgatcctggcgacgacgggcaaggcgtccacggggttggctcaagagttcatcaagggacacgtcaagaaggagtacctcgccagggttcgcggcaaatttcccgagtgagcccgcgtcttgctccttgttgcgccccggctcgccagctgatgtcggatcgagatgacactcgggttagcgaggagatgacggtggatcaatcattgttgacggtggataggcagatgggtctggtcatttgcacgccggacggcaaggtgcgtttcgggatcagtctttagcaagggtgacggcctggccagtatctgacatcacagcgagcgttcggaacaggacgccaagacgatattcaaacgcatgttttatgatgaagagcgagaccagagcgtggtgcattgtgagtcgggatcgtgtgccccctcgcatgaatcgggtcgctgaccttgtgcgattgtacaggtcgaccgatcactggacgaagcgagtccatcggcatggggtcatgaaaggacggaccgacgctgaccgttctttgctcatagcccatcaaatccgggtccatctgcagtatttgggctacccgatcgtcaacgacccgttgtatggggaccctcgggtctggggaccgaccattggcaagggcggggtcgacctaacaccggatgcggacgaggaccacacggtgctcgacgtcggtggggctgtcggggaggaagacgggctgtcgtctcaacaggctcggatgcgtggcgaggaatccctcccgtctggcaagatcctacccaagacgggcaagacggagcaagacctcgctcgactgaagaaacgactcaagggggagctcttgccccgtgaatccgaggtcgaggacgacgcggtcgggggtagtccgatttatttgagcagggaggcgagggaggtgattgctaaactgagacgacaaaaggacgaggccgaggattgggccaagtaggtcgagcgaggtcggcgcgaggctgagagcgcaagctaaaactcgtgtttgacgtggtcggcgcaggtggagcgaggtcatgtaccggacgaaacaggcgacattggacacgaccgaaagtgagtttacggcggggttcgacggcgggcatcacaaggaaagggcgcgggagacgtcgaggggacattggggtgttgcacggacgcaggtgtgggcaccgtcacgtcgtcgagagctcggggaacgtgcgggaacgactcgattgccccgccccctttggtgcttgggaactgcgttgactgacgtctcctcaaatcgcagaccagaacccgccctcgacctcgacgccgacgccgtcgacggtcttgcggttcagctcggtaccccccggattctgctctgaatgtcacatccccttggcgcccgacccttccgtcgaggggttattcatctacctgcacgcgtggcggtatacgaccgaggcgtggggagagtttagtacgccgctgtgagtgcaccgtcggagacgtcaacgtggtcgtcgtggtcgtggtcgtcgggaatgagaggctgatcaggcgctctgtttcggaacgcatctgcatgggaattcgggtcatctactttttacaatcaaccgctcttcgtcgtcgtcgtcgtcgtcgtcgtcacgttggtctactatgcacactctggatgctacactctggacgttccagacctcgatgggctgagcggggttgggacgggttgatcgccgatgtcgacgttgctcgatcatgatgacgacgacgacgacgacgacgacgacgacgacgacgacgacgacgacgacgacgataatatgacaacatgtgaaacgaggcggcggcgggaggcggggacgcgatgcgatgcaatgcgatgcgatgcgatgcgatgcgatgggaatttctgtcagagtcgtgtgtatcgtgagaaatcatccatcaatcgacgtcgactctctcgagtgtcttgttcattggggcggggagggagagagaacgtgatctatcgtcgtgcaaagtgtcaagtgatcatgggtcgttgttgccaagacacatagcagcatatgctcgtgcatatctcgtgctcggcgcgcgggttgactcgtgattggacgagacgagaagcatgctagactggcatgactctcctgttggcctgttggttatctctgatcagcacgaggagcagtagagtgggagtcaagctgaactacactgatgtccgaagatggccgggagtggtgggagataagaaacggtttgctatctccctgcaagtccttaagccgttatctatcgatcgtgccccccttatctttcaccctcccttccctctttgagtaaccccccgtctcgtcacccctacttgttatctcgaccttgtcccaccatcatcatcatcattcatcgtccattctccagatctctcgacctattgcctcttgtgggtggctttgtggtcgtcggtggtggctgttggtacgatgcatgatgtccaatgtcaatgtcaccccaggtccatggcctcacgctctctagttgtcctcccccgctcttcgtgccaagaccttgtttgagattgtaccaccctcaacccccatacccaacacttaccgactatcatatcatcgtatcgtcgtcgtatcatcctcatcccttggctgctagctgctcagaggtctcatccacagccttgcagacacggccaattcgtactcctgcaaacaactctttgaatagcaggccagaacccgcaccgcgcatctgaccaccaactaggatacgttgatatcgacgtcaaccaccctacgtcgacgacaccaccaacaccgcacccgtcgtcatgtccgacacgatccgctctgaatcccgaggtagagagtttgtaagtccgacccgtttcgtccccctcgctgcctcgctgcctcgaaccgacgcctcgttcgcccttttcgcagatctcgaccggcaggggtggagctggcaacgccatccgttcaccctcccgtaacgggtcttccatgacgaccccgaccacttaccccggtatcgacccgacgttgcaacctggttccgaacgtggacgtaccatccactcgggcggcatcaacggcggtgctggcggcggcggcaaggagacctcgctcgaccgggtcatccataccggacgtggaggtgcgggcaacacccgttctcctagtaaacaggggagggacgaggccaggcgtgaggaagcgctcgaggagaggatggtggccgaaagacggggtagggagatgttggccgatacgccttatagtaccggtcggggtggagcgggcaacatgaactcttcccgctctcgttctcgatcccgtcaaccctcgttgactcggtcgagcacgtcgggtccgaacgctcagcaacatgcgcagcatcctcatgctgccggaccgttgcacaaccttttgcacggaggcaaggcaggcggcggcggcgccgtcgatggggaattgagcaagacgacgacgaggagtagcagtagttatgtggtcagtctcgaaaaccatgtacgtgatgtcgatcgtgagctgatcttcatggggccatgatcgcagggaagcggacggggtgggtatgggaacatcatccctaccgatcaaatgtccccggaacaacgagctcaggtgaggggtttcagcgcgaggtcggccccgaactgcccaccggagagactgaccgtgtcgactcgttactcttttcgacgtcaatcttgtctgacgacgctcgacgtcgacctcgatctggacccgccagtttgaggccgagaaactcagcgacgctcagatcttgagtcgataccgttccggacacccacacgagatgtaagtccgagccatcccccgaatctggtcgggttttcctcgacacagagagagagagccggcggcaaggacgatagctgatcgtcgtcaagctcttcatctgtaccgtccttctctctttctttgctactgttgccctcgacattgtctctggggaactgcttctaccgggacgtgacatctggtcctcaccatggctcggtacacgttacttgccacggctcggctcaaatttctcgccacgtttcggtatacattactcgctgtcgctcggtatgcattcctcgctatcgcttggacggaactcctcgccgttggctcgggggatatcactcgctgccgctcggtctacattactcgctatcgctcgaattcaaacccccagccactcgtctggtcgtggcgggggtggcaacttggcggcgcctcttgcgaccgagaccgaggcccgtatggcggccatctctctcgaggatcgcgaagctcgtgacaaggtggacgccgagtctgcccgtctcggtcgtacgacgggacatggcgggttgggtaattaccaacctccaccgatcgtcgaggtcgacgaggaagctggcggacggggtcgacagtcgaacggcggcgagatcaacggtggtggtggtagtgggggtggtggagggatgatgagaaaagtgatgaggagtctgagcaggcagagcggaccgagggataggtcggctgtcagggggtaggtaggcaagccgaggagaggaggtcctcgcgcccccccaaactcgaactcgctttccccgtcgtttccctcgattatctccctgcgtcatcgtctctctaccttgttcccatgctcatctttggcttgtgtgcgtgcgtgtcatgtatatgcctgtagctgttggtagttatcttgtctgtgttcaaacctatacaaatccgactttaattcactcttttggcgacttttggcgcgtcaaacacccaacgagaccaggaagacgacgacaaagttgaacaagttgaaaccattcaatcgtccacctcttgacatcgtctcgtcgttgttgtagctctcctcgctcgctggataactctgggacgaatcaagatgtcgagcgtgctcgatcgtgtacgtcaactcgaagaatcgccgtccaagacggaaaagaatgggggtaacgagcatcgagacgagcagatggtcaaggtcgatgacgatgacgagaccctcgagagagaacaccgggataggcaagacgagggcggcgatgacggtgacacccagatgaaagtctctgaagatgcgaacaaggacgtcgtagcaagctctcagctcccggacgagcaggcgagtcgatcttgatcaccagtcatctcatcggacacgctgacggccttccctttcgcccgccgtgattctccacacccgcagcagccaacgtccacctcgttgatgacgaccttaccaccactacccgtcctggaccctctcccggaagatacccatgccccagaatctcccaccatatccctgattgcggcgctacgtcaacagatctcgctcctcacggaccaatccaccgagctcaacaccaagctcatccggcagctcgaacgtgcttcggacctcgaggataacctcgaacataaacgcaccgccgagagggaaaaggacgacttgatcgccaagctcgaggtggaaaaggctcaatgggaggagaatatgaacactggcctgttggtcgagcggggcacggtgagggaagagatgcagagactggtcgaggggttggtcgaagaggagaaacgacgggggagtgccgagaggggtagggaacaggtcgaacaggagattgacgacttgtcggcgaccttgtttgagcaggtgagtcgacgcacgggggcctgatcacgacgtcgggcgtcgggggctagacacgcatgctgacgatcatggaaacgacccggattcgcaggccaatacgatggtcgctgccgaaaaatacgctcgtgcacaggcagagactcgatcccgtcaggcagaagagaacctggcagctgccgaggcggccatgagggacatgcaggcgcacttgcaatccctaccgacgacgcttttgcccgccgccgacgtctcctccgcccaacctaagaggcgctacctagcggccacggtgacccacatcgaattcacatcgttcatcgcttacattcggatgctcaaaccccagtacctctacgccggtcaagcttacccaccagcccccgtcgtctcaaacctgctctcacaacccttcatcgcacgtgccacgctcgaagacatcgacccgaccctccgcctggacacggctcccgacctcggatggctgaatcgaaggagcgtccaaaacgccatcatcaccggcgagctcgccattgaacccgtctcgctcagtacgctgctctcgacatcgacgttcgcctcggcgtacccacaggatattgggtgcgcaatgtgtggtaaacaagtcgtcgttcgacctcctggcagcctcggcgcacagaacacgcaggaacacctgcccccgcctgtccacccgacggtggcacccgcgaaaccccaggcaggatcgagattctctttcaaaccgttcttcacctcgccatcaaccgcaccctccccagcggcttccccttcggctcctcctagccccttgcctaccggaccatcgcttcctcccgtctacgtcttccgaatcatgaccccaacgacgatggctagcgacaaggaaaaggaaacgctcggtcgtctctaccctctgtgcgccagcgggtggtgtctagcccgactccgggctgtgtgcgaatggtggaggtttatcaggacggggatgatcgacgtcatctggaggggcgaagacgggtggattcgccccgaacgtccgtcgactttgatgaccgcaggacgaaatcgttcgagtatcgctccgtcagaggataagtcagatccgcctactcccaaggcggcgactggtgagacgatgctgcccggggccgatgcagagcccctcagggaggaagacaaggccccagagcttccgcctcgcaaaaagagcggctgggggttgggctttgggtcgttgggcgggggcaagggactcggtttgagcaagggcgacacgccacctcaaagcccctcgagcgagtctcagagtcgattaggtgacgtaccggtcgtcgaggagcaagtcaaagatgaggccgtccctgatccggttgtaccgaaagccgacgagcccaaggtcgaggtcgaggacgtcgctgagacgcaagaaagtcaggacgagcgcaaggaccaaagatccccgagtgatgcgagcgagcccgtagactccaacgaaccggccgagactgtgtccgatacactggcggtaccaaagaccgacacggcggctggcgactcggacgctgaagaaggtggaaacgacttttctacgcccaagagttcaagctcggtcctcgtgggcgatggcgaagccgcgtccgcggcagaggtcccgaaggatgagcctacggataaaggcgatgctaaggtcaacggggacattgcggtcgagccagaaacccaggccgtagacatttcttcgccacgaccgtccatggatattaccgcctcgggtcgaccgtcggtcgatggatcgacggccccgccgacaccggctcgatcggcagctcgtcgagctgtaccgcctccccccggtacatctgccgctcctcccttgcccgaacgtaatcggactcgacccgtatccactgcgacgctgggcgtggagaacgtttcggcagtcaattcgccaacgctgcctgtaacgcctgatatgggctcaaacggtcccggaaaccccataacgccggaaccccccgtctcttcttcccaggcgacgactcctcaagccggtccacctaaacttcccaatcgggcatccatggtgcccgggacgaccgcactatccaaatctggcaaacgatacgtcgagggcgatagctgggaagccaagacgtggcgagaggtcgtcaggctcaaggaggacatgtggaaagctagggtcggtctggtcgagggtgaagattaaggtagcctggacattctaccctcggatgtgcttcgagtgtgcttgtaaacgattgctgttgtaaagaatagttttatatcctgatccgcaaaccagacggtacatatacaatcatctcgagtgattcttgacatacatggtataatgatcgattatagacgtaacaaaatgggcggccgcgcaggacgatcttggagatcttagcagttgcacgcttgggtcgcttgttggttggaagcttgacctggagccagtttgactcccctctggccgggcttgccgcccgaagccgcttgtgcgggcagcgcgaggggcaatttcttggcctgtagtaacgagaccatggtccggggtcagcgtctcgaagcaatgtattccgatcgacacgtaggactcacaacctgcatgaaaatatcttgcacattgtccccggtcttggcactcgcctcgaggaataacaacccttcctcctcggcgtacgcctgggcggcctctcgatccgtccgacgagcggattccgccatgtcggatttgttgcctacgaggatgatggtaatggcaggatcggcctgtcgtcgcagggtctggacccatgtcttggctcgctcgaacgaggcctgggggtcgggtcaaaggggtcagcatcctagtgatccggtccgttctgactgatcaagcttacctcgggcggcttagaaggagaagaagtccggcaagacgatcagcctcgcacttgttcagacaatcgattcatcaaactcacctgagtgatatcgtacacgatcacggcagcggcgctgttccggaagtaaatgggagccaaggaccggtatcctgtagggtaggtcaggtcagcccgaggcgtcatcacaaggccttcatagccggctcacgttcttggccagcctgaagtcggaggaacggacaggatcgttagagcgggaaagccgtcgtgcgagagagcaggattggccactcactgtatcccaaatctcaaacttgatatcctgtccatcttccaacgtcacggtctgagtcaagaaggcggcacctgcgcagggagatgagacgataatttagtcagcgcctaatggcttcctgctgatgaccttgctagaagctgaagacacaccgatggtcgattcgctgtagttggacgaaaaggcggacgagaccgaagcggcaaaagagtatgagtcatgactcccttctcattattcgaggactggctcactcaccgaaagtccgaatattcatccttgacgaatctgagcactaaactactcttccccacggcggactcgcctagagacaagtacggtccaaagcttgacgatttagcacagcttgggggaaccggtgcgatccggaatgaagctcaccgagcaggacgagcttgaaagattgcgtattcctggacatttgatatgagatgggacgatcggttataggttctgatgggagcgactgtgttatggggatgccctttcaggtaattgaggcgacgaccttttcaataaataccatcgtactgtaatagcggtctgtatgattcgaatatggcctgaagaggtagctagatcatcggaggcgggaattgattacgtaatcaccgaccagatatcaacaccgtctcatcttatcgacctcgtgtttcaacttgtgaaccgagggaaacgttcggtttctcttaggtcaactctgtaactatcctagactattcagacagacctcaaacatcttgtcaattgaaacgtcatcgaattctgggtgcaacgggccattctcgctggtgtctatcagagtaacctaatcgtcgaaattcgcgtgcgtgctatgtgtccgacagcacgccatggccggagttggtcgacacgcttcaacaaaggaaataatcattccctataagtttgacgacgactcgagccttctacgttggtatatcagggtctgactctcgctatcgaggaattctcctcgtcaataacgataggataggggacctcgagctcaactataccgttctatcacatcgccttgcgcgctacccaacgtgaacaatgaaccttctgttcaattgctatgacagtaacacaactgctgaaggtaattcgggacgtatatggcatagagattgtcgtaagctcactcgttgcgcatttcgtacagatgcaacatcctacctttcctcacagtcggctcacttgcaacaattctttgacgatgaagccttcgctggaatcaacaaagacacaggatcatcaatagtgacagctaatccctttgaaaagacccccgatggaaattcctctttgaaatggaataggtttggtgcttctttccaatccaacccagtggacaccgggatggagagctcgacatcttctggatgctcgctcaactttagtatcgcggttgatttcacaccggcgcccgggaatcgtaccactagcacaggcgcttctagataccgttctcggcgtcccccgccgaacatcccacccagcaaaggtcgccacaggcatgacaccccaacggagcagaatttagctacaagaagaaaacaatttgaaaaatggcagtcaaagaaagcgatgtgcgggaattttccaaggttggatgtgaagggcgatgaggatgtatcacagctgaaattcgttgcggaaggcggactcccacaatacgctgacaataaggaaggtgttgagcctacgaatcccctttaatattgttcgtgcggcacgaacccctcgcatatatataaatatatatattcatgtatattcatatatatattcacatactgccaagtgttctattataacgggtggtatagaaacaccgtgtaccgctctgaaaagccccagcagatgacatcgagcagatacgtgtcgtgtggtcacaggagtcctataccatatgttccaggcttcagcacgccttaacctcgagggtcagctactgtatcgttagacatgtaccgcgatcctttgtcagatgggttccggcattatgcagacgatctcctctccccgtgttggtgcgagggggattcgatagctcattgtacctcttgttacgtcttgcaatctctcttctgcgccatgaacgtaggggggttggattcagcgcaggttgacgagcccattgagcttcctactcaaaaaggagcccctgaagtcacctgactgattgccttttcgtagcaatagggacttgagggccatgactatatataaactaccgacataaaatgagggctttgttgatcattgagagtgatgtggaataccccttaactgcagaagctgcaacaaatccaagattatcgttctcttacacttgtcacaacggtaatgcgtgaagacgagcggaggtctgctctacgtgacgtcccagacccggacgagttcaattatctcaggagaagagtccactcaggggcttcctcacaagaccttttcgtgatcccggagtaacggacccacacgggtggcttctcgggaccggtaaccaccaactccaccgatagtgcagatggcgaaaatctcaacgagtcgacctttgttgcagactcggtttatccttgccctgagactaaagctgaatcgccgtcgggcgtggtatacgccgactctctactaaacccgacttcgacgacgatgtcgaccggtacacggaatgacggagggatttcaaatcccaactcaaaattgaggaagcggcctcgagatgatgaagagggtccatgtcatgccgtaaatgttgcgaccggcggagggggatgacaaggtcttgcctggcacccaaagagacccaagctgaagtccgatcaagagggaagggggctagtcaggcctagaaagaagcgtcaggtgagcgtcgcgtgttcgagcttgaatctcgttatgtagaaatgggagatgtgtagcgcaaatattcgattggtccgatgagacggatgaaacctttgttccacttgtcgatcagtctgcccaggccggaggcgataatccggctttcgcggaacttcagaggcaggaggatgagtaagccggtgttatcgaaagaaaagcttgagtcggtgtaggcaactagattagcttatgcatgacctgttcgaagcaaaccaaaccaagcgatggttgtgagatcgacctgcactcgaactgcattagtgcgactgttgtttccactttcgtctgcgcccttcttgcgtgatagaccattgcttgaatactggaaagaaaaatccacccctctatgtttatgatgcctctttccttggttccagtttcaatgtcttccacatcgttttccacaggcagagccggcgggctgtcacgcttgcgtgactgggccgcgatctgaaaccgcgtcatttcacgccaagaggcccatctcatcgcggccatgtcacgactcatgtaaacataccgggtatatgcgcgattcagtctatcgcccctaacccattcccctatttcttggccttgtccaccacctgactatcctccagatcacaccaagtttgcgattgatgcaacgcgacatgcatgtcctggatatcgaggtatgtacggtgaggtggtcgtctcatagtccacgctctgttcccagtgatgatgaggtgtcgcccccgagccacgcgcgagtaaatggcacaggccaggggcaggggcagggcaagccaggcgcaggtagggcgacgagggaggcgcacgagccacggagaacaataccgagagctacccacccccagcagcagcatctcgtcggtgacgactgagccgaccagaccacacttcaggtcgctagcaagcaatccctagccaactgatacactcgacatgcagtgagctgcccatttcaacctaacgacagtccacaagatcagtcgttcaagctactagacttctccgatcgacccccggtaacgacccgctctttgcattcgtcagtcgaccccatcagcaaaccactcgtccgccatcaaccatggccgagttgcctcccatcgacatggacgcgacgacgtccctccctccgatcaacacgtccaacctgaacaagacttctcgcaaccacgccgactatgccgccgccgccggtccatccgtctcgacaaaagaataccaagaaaaggcgatcgccgccatcgcacgtaaaaagcagagaaagtttgacattcccaagattgatttcacccagcatcagttggagaatggtgacattgttagcacgaaccagcgagtcgtcaaagatgtgagttggacaagtccccatcacctcgaccacgcctcgctcgttttcgttgacacgacgctcgtgtgttccccctcaggttcaagctcctgcgatgcgacccccgacggacgaagagttttattccaagacggacccttcgaaacccgacattgcctttctcaagaatcacttttatcgggaaggcagattgactgaagaacaggccttgttcatcctcgaaaagtaggtcgactctcgcgtcaacggcgctcgggggcgggggggtcagagtggtcgctgatgtggttttccactcggatgtgcacctttcttgcgtatcgcgtggctctttttggtaggggtggagagatcctgcgtcaagagtccaacttgttggaagtagacgcaccgatcaccgtctgcggtgacatccacggtcaatacgtcagtctcttcactctggtcgtgtggtattgactatcaaacccctcggtcgactgatgtcaactctcctcgtcatacccgcagtacgacttgatgaagcttttcgaagtcggtgggaacccggccgatacccgttacttgttcttgggagactatgtggacaggggttacttttcgatcgaggtcagccggccttggcggcacgtcgcctcggaccgatcgctgaacaggttctcgtcgcgtgatcatctctacagtgtgtgctctacctgtggtccttgaagatgtggtaccccaacacgttgttccttctgcgaggcaaccacgagtgccgacatctgaccgactactttaccttcaagctcgaatgtacgttggaagcccgatctctcacaccccaaacggaacgcagatcgattgaagtcggctgacgttcctcttttgtgtccccgcaggcaagcacaagtacagcgaggtcgtctacaatgcctgcatggattcgttctgcaacttgcctctcgccgccgtcatgaacaagcagttcctctgcatccacggaggattatcacccgaactcaacaccctggacgatatccgaagcgtgagtccgcttagggaccgttcagacccatctggtcaacccgctgagcgacgtccacatcctcacgcatcagatcaatcgattcagggaaccccctacacacggcttgatgtgcgacatgttatgggcagacccgttggaagaattcgggtcggaaaagacaaacgagccgttcattcacaatcacgtgcgaggttgttcctattttttcacgtaagtcggtgtatggcgtgatgtagctgttgtaccgttggactgaactgaccggtcgacacaggtataccgcggcttgccaattcttggagcgaaacggactgttatccatcatccgagctcacgaggctcaggacgctgggtaagccgtctcgttgtgccggttagtcgtcacaatcgaatatcggctgactcgcaacggccggaatagataccgaatgtaccgcaagaccaagacgaccggtttcccctctgtgatgaccatctttagcgctcccaactacctcgacgtgtatggtaacaaggcggccgtattgaaatacgaatccaacgtgatgaagtacgtatccgctctgatcgactttggaggactcgatgctcatcgtctttccgtgcgtgtagtattcgacagttcaactgcacgcctcatccctactggttgcccaactttatggacgtctttacctggagtctgccgttcgtgggagaaaagagtcagtccgagtgcgaccgagacgggatgaagcccgaagactcaaccagactggtctgcatctacagtcacggacatgttgattgccatcctgaactgctgcaccaaggaggaattggaagaggccgaagaggaagaacccacctcgcctgaagtcctctcgcccgctgatgaaggtgtgtttggaatttggcgttgcgagtcgtgaccgcagactcggaactgaccgatattgccgcatgttagaactcgacggtcgtgacgctgccaagatgaagaacaagatcatgctcgtcggcaaaatgtctcgagttttcgctctgcttcggtgagtgtcaaggtggatcatgtttggccttcacgttcgcgggactgactgacgtttacgacgaaataaatagagaggagactgagcgagtgggagagctgcagactggaaacgaggacgcggcgttgtcgggtgacgctttggcttcaggtgccgagggcgtcaaggaggccattcacggattcagcgaagcgtgagtcggagatcggtgtaaagtcggtcccgatttgagactgatcgtacgtcttgcgacacgccccacagtcgacgagccgatattaccaacgaacgattgcccccagagctcatcgacgccgacgaggatgcccctgcgtcgccattgcgcacgagcggtcccggtagtccgtccgagagcacgccgccgatgttgtctagcccgaacgagtcacccgctttgggcggcatggccgagtctcccctcgggtcccccatgagccctggcagtcccgagctcggtgcgacctggaaacccggtcacggtcgacgattctctctgggtacgacgaaccgcacggcgccgagtaaccgtcggaggagtctggaccagaccatggcgttgatgaaggaggtgctcgagggaacggatgcgaacggtgcggacacggcgatcgagcggatcgcggagaatttgggatctccgcctgcgagcccgactcgatctaaacctccgcccggtggaccttttgcctcgtaggagtgcgcgaagtgtcggacagagagaaagagagagagggaaatgtcggccatggcttggccttcccgtagctgtccgttctgtatcaccttgtaaccccgatctttgccacttggcaatttgacatgacccgcggaatctcgaccgatccgttcagatgttcctgtacataattcccacacctgggacgacgattgacacgataagatgcaagatgatggatgatttgcgaaccaagatccttttcgagagaatccggtccgcggtgcgattgaggggcatgacgtagtgcgacgtggagagcagccaagtgaaaggcggtcggtcgcgcgagtgattaattaccccgccccgcgtttcagcccgctgttcgtcgtcgtcacgaccaatcttcatcgatccatcagtccatcaagcaatcaatcaggatgtgtctcttcggtgatcacgcggatgacatgatcagagggggaaagtatgatgatcaagaaggtgaatctgagcttctctcccgtgccaagctttagctctctagtgtgggtggcgtgtgcttcttttcccttgtctgtctctgttgcgccgtgttttcttttcggttaagttatccatccaccttggtctggcagaaaagtaggttgcgggaaaaagatgaaggatggatctcaatcatcgctgcgcctcatcattttcttctgtcgatttctccgtgcttgtccctccgaatccgttctccgatcagagtgaaaaacgtgttttgatggcgactacgggggaacgaccggctgggtagatgctccagaacgtcagaggtccagccatatcgatacccgcatactctcgtcagactcggatcaggtcacaacctttggcgaaaagactttttcaacccgcatggttcctaccttatccaccttttacctctcacactcgccgagagcactgcgtcgcgtgcttacctgcctgcctttgacgacggacctgagttgtgaattttctgccagatcgggaacacggaacgagaagtgctcggcagacatcaagatcaacgatcatcccgctcatcaacatctcaagatcgagacggagggagagagtcagggtagtctatataagcagacacctgcaggaacggtcgggtcgggccatcatgcccgccggcatccgtccaccacttcacctgcagacgtatccgaccttgcccagccctcgttccgaacctcaactggtcgttcgcaacgaatcatctcgttcgctgacgtatcacatcaaaaagagattttcccaaaacgctacctcgtttggacagaaactagcgccttggaaatcattctcactcgaccggcccatttccgaacaggataccgacgaccaaggcgtctcaccgatatccaaggagaatcgactcgctacagctaccatgttgcaatcacaaagtcctcatcattgccaacaacaacagcaatctcaacaacacccggccgattttgggccccgagcgacaggtccaggtcagaccgtgaacaccacacagacggtcaagcgtggtctattcggtatatctagacaggcagacccgtcctcgaacgccgatcaacgtgctacccatggatatcgcgatggtatgcacgaaaccaccgctcatggcgcggaactggccgacgattttcctgacgacgcgtcgatttttacgaccgacctcggcggactgcgtcgaaaggggtcacaaaagattcaatcgggaggttccaagccacaaccggctccatccatacctcattccaacccgaccccatcgacgggtagcaggattgcccaattctttggtgccggtcgggacaagagcgtcggtcacaagaagactcagcgtcctgctacgaccgataccaacgctggaggaccacctcctccgttcggacagacgcgacctcatcagaatcaaggcatcaatgtccgtgtagaagccgacaatggcgccttgatctacgacgatctacagggcaagctcgtcccgcgtccgagtgacgtctcgtttgaaccgacgatagaagcgcatcatgccaatgagacccacgggaataacctcttgaatccgggtagtaagaatggtctgggtaacaaccggctcaggacagcctcgggtcccgcgccgctccagcagaccatggaagcgcactcgctccccataaaaccgacaacgaatcgaccgttcgggtttggcacgaaatcccgtcaaccctctcaacccaaccctgctcccgcttctcgatcgggtacgcccatgtggaaacaccccagcgcgacggcctcgggcgggcaagattggccccgcacccgagccgaacgcaactttcgtttcacatgggaagccaacccggggatagtcgatgggaaagaattgatggggttcggcggcgaatttgggaggaagcgggtcaaggccgatgcccgtatggatgcaaacggtcgaattccggatgcgaggggtgcgaccgaagtcaagagattgccctacgttatgggttatgagcgatccgtgctcgattggtgagtccgcgcgtcgttcaaatacgaaagccgtgctgattcattggattgctggctttcgttagcgaggccatgatccacgaggcctacactcagatatgcactggcaaagcgacgttctatccggacaatatggctctacctaaacgaatactggaccttggtacgggagtcggcctgtgagtcgcatcccgccatacggtgcagttggccgtatactgatgaaacttaatggtcacccagctggccaatgacgatggcacaacaatggcccgaagccacgattgtcggtctcgacattgcgcccatccaaacggacctggccgcgttggcccgggctcaagcgctcgtcggtcttccagaagccaaagggaaaaaggccgttaactgggaagaccttgccaagcgtgttacctggaagattggaaatttgtgagtgtgacgctcggagtcccgacatgggtcgatttgctcaagccgctgatcaccctatcgtgataatcagcttggaaggtctgccgttcgacgacgagtcattcgatttcgtacacttgcgatttgtcggacttggtatacccgagactgcctgggagaatctcctggaggaatgcgctcgagtccttaagaaagggactggtattctggaggtgagcacatcttacctcgtccccccagcgagccataaggaaaactgatcaggctgctatctcgcggaccagattgtggagatgagcaaagtcctgccgtccaagacgccgatggcgctgcgagcttcgttttcgtcgctcatgttgtcgtcatttctccagccgtacccgttcgtcacgctccgacccgcgcttctctcttgcgggttatcggccaaggaagcgatgaacgtgacgttccgtcgaagtcaattgaccgaatggcatccagcttcgacgatcgagcaatgcctcgccgcctgggtggacagtgcgctcggcaaaggcaaacacggtcgaggccgcggcatgagcgggactgggcgcggacttcgatggggtgaagaggtactgggcgagcaagccgtcagagcatacgagtcgaccgcagacggtgaagatgacctggacaaggccgaggctgctttgagcagtgctcatgaaagtcagaggcaggatgacgttcacgaaaaggacgagatgacgatcgtggcctggatcgttcgacgatagtttacttgggatggctttgcgagttttgggtcggatagattgtaaagcattgtttgtatatggtttgtatccttgagaggtaatgtaacgaggactttactaggtgctcagtggaaattgccagctaccaggttcttgtgtccacatgtctattagttggtgagtataggtatggtggtagtgacgatatgtatctacatggtcgtggggtcgactgtgatctgtttgttgatcgatattctactccaaggggaggtggagggcagccggaacatttgcttccgcgtcgacctagcttcactcagcgtcagaccaaacaaacaaacaagttggacaagttgtatctcatcgtcaacatcctactctatctaccgcccatagctaaagctctcttctgcaataggattacccctgggaatcttactgaacgctacaaagaaaagtatggccgatagtctgacgctcaagatgcgaggcctcgcggtctcgtcgtcacaacacgtttcgagctcgagcactggccatcacggaacgctgctctcgtccaagttggatagaccttctgtagcgaccaacttggccatcccatccggctcgggggcgcttcatcggatcgctcctgtcgtcaccaagtaccgcaacccggagatgggaaaacacgacggccagacctcgtcgagcgcatcgaccggtcaccatcaagacgcaccacgagcagccttgatgaggctggcgggtggagcacctaatttcgatcggactcccgctgccggaccttccaacctatccaaaataggctcgcctaaacgtctcgtcggtcaacaccccgctcacgggattcacggtcctgcccatggaactgccgccaggacgttggctggcaagatcgctcccgtcgaggcgaaaaaagtgccgatgactacggcacaaacgaccatgatcagggaagtcacgttggaaaagcgagctcccgagatgcctgtcgatatgcgcacagcaaaggtcagagagccgatcaggaagggcgatttagaatcgtcagacatgcctttcaagccgtgagtctcgctgcttcaatcggatgcggagcaacgatgggatcttggctcactgtcaacaatcttgtgcacccagacctcgctcattggcagactttgacatcggaaaggcgttgggacgtggaaagtttggccgagtgtacctggcgaggacgaaaggctcgccgcaatacatcgtcgctctgaaatgcctagtcaaggccgaaatcttgaaggatcgagtcgagaaacaagtcaggcgagagatcgaaattcagcagaatctgaggtgagtccgggatcatgctggtcgttcgaccatgccggtcaggcgagctgaagttgctgtggtttcgccgtagacatccacacgtcctccgtttgttcacgtatttccacgatagcaagcggatcatcttggctctcgaattcgccaacaagggagagttgttcaaacacctccagcgcgatggtaaattcgacgacaagaggagtagccgggtgagttgtcatcagccataacaccatataggcttctgggtgttcccactcgctaacgcttggcctcgcatagtacatcgcacaaatggccgacgcgctcagctatctgcataccaaacacgtcattcatcgcgatatcaaaccggagaacatcttgctcgacgcaaagggtaagctgtcggggttgatcgatcagattattcggacgccatatacttagcacaaactatggcctacaggtaatctgaaaatcgcggatttcggctggagcgtccatgccccttctgatcggtcagtcgtgcgagtcctccgtgtggttggttgtccacggctgaatccacacttcgtgcttgcagacgccacacttactgtggaacccttgattatctccctccagagatcattctgggcaaggggtacggtcacgaagtcgatctttgggctctaggtgtcctggcctacgagttgctgtgcggttctccgcctttcgaggttagtcatcatggccgagatgtgctcataggacactactgacaatgctgttgcactttatgtctgctatatggctaggaggattctcaaaccggtaggtagtctcagttctgcaagaagtccggagtatgaccgctcaccctaccgcttcgtacaccacagggacccaacgtaaaatctgctcagccgattatgtcatgcccgactacttttcgcctttagctgctaatgtgatcaagcgggtgagtttactacgagaccgagacggatgacgttcggcatcgtctgatcgcacgtccctacagttattggtcctgaacccgcccgatcgaatgactttaaaagaggtactatcccaccaatggatcacgcagtacgcaagtaaatcccgcaccagcggtgcctcgacgacatgacgcccatcactcccacaacgcgacggacagactccttttcctgtctccgccttataatgactcgcatgaatggacattctaggcatcgatatagtcggcatggatttcttaacgaatgtgcggttcattcactttacgagcacgcagaagttgttgcgctttccccccgttctcaagacccgcttcgtcgataattctgtgacggttggatgtcgatccggactctgcttctgccaaaggctgtagacgaccttggcgcattctttgtcctttcggacgacttctttgaagccgacgtggcgcatgatccgaatgaggagctcattgtccagataccgagaattctcgatgcaaggtcgaggtagaaccagaaacacatgtccatcaaccttcagttggccatgaatcaagagcaacatcttgcctaccaaattaattgtctggttgagcttgctcggccaaagcgtatcagttcgggaatcgcgctcacctcggtcgtagggatcaggaacgaaattgagcaccagactacagctcacaacgtcgtagcggtcgacctcttccttgggaagcgggcgttccagaaagtcttgctgaatgatgtcagggtgttgagagttcaggtccatgggggtgtttgctatccaaggctgcactgcagcatgattacgaggagacagagcaccaatctccaacatactgcatggaagacgtgtgtatgtcagtgctcagcgatggatgacggccggggcgagagtcgaccgtactgtcggtacataccgcaacttggagccttccttaggtcgaatgtcaagatccttcaaccaagtcaccaagagtttactggtgtctccgccacgagtctcgtcttgacccaagatggatgccgtctgatatgctggcaatcctcccaaatcatccatctccttctctacatcggctagctcctgtaccgctttcgatgaacatgccgactcgagctttgacttgagctgagcttgacgtttgagaagggtgtggaatcttgagattgtcgcctgagtcgctgtcgaactcttcccgacgcgagcttgattcgagcgggtgattggctctttcctagccttggtggaacgtcccatactgtaggcaatggtgtgagcagcgatgatgctgatgaggagtagcgtagacgacgaggccattctcaagaagttgtgttacatgtgttgtggtccattccgagcttgaaccaacttttatggcggataatcgcgcgaagcccgaagcctgatgagctcggtctgatggtgataacgttcactctacttcccatcgtactattagacatggccctacagattctcttagctctggccacacatacagtcctgcagcatactcgaatcctgcgactgctatcttctgactaggaacatgtcgtcgggtgagctggacatgcgtttaccggttcgcaccctagctaatccgccgttcttccccaggcaacgctgagattctcgccgaagagtacgaggtgaatctcttgatcaagagaatatggaagttcggtactcgaggtactgatccgcaccgctgacgtttataggtactggaatccatcttcccggaagaggttgagagttagttctccgcaagcgtcgggctcttgctcacagttgccattctgattcccgctctgtgcacaacagggttgtctgacgatgtactacggatacgagtcgagccggaagatgcattcagtgctggcaaacgtacgttacattcgtacgaagtgccggttcttcggctgaaaatgacttgcgacggacagtgaccgtgtcattactggtcaagtatacagccgagtatccagacgagcttcccgacctcgaattggaagcgcttgagggagaactcgacgacgacgagcaagaattactgatcgaaggcatgaaaacggcagggaccgagtcgctggggatggcgatggttttcaccttgaccagttggctgagtcaagctctggttggcgtcctcgatgaccgatctcgaagactaaaggaagccgaagataaaaagtttgcggaatacgaagaggtacgtgaccgcagattggctacatcagtgttgcctctctgacctcgaacaaccataggccgaggcagccaagaagcggggtacgccagtcacgccggaaaccttcatggctctacaaaaaaggcttgcggaacaagcaaaggaacgccggaacaaggctgaagatgagcggatccgtgcactcaccggcaaggaacgggaagagtacaaaaaagttctcacccgaccgacaggtgagacatgtcactggctcgaataacgcttccaaactcgatctcattccgttgggtacagggcgtcaactattcgagaccggaaagacatcggcacaggccgatctcgagtacgaggatgacgatgctggtggagaattctcatatgatcgttacagtcgagaggagcgagacaaggcgagactggagagagagaagcaggaggaatctggtggaacaccagccatcatgtatgacagtgactgaggggagattgatgctatgcgatattatatgtagacaagtgtgctaacgaccaagcagaagatcaactcaagaaagcctccactcgaaaacacgtttggcctcttttgctcttttctgcatagcctgctcggcctcctggccccacaatgcctcgcccgaacttgtgcccatgagaacttgttccaaatgcttgtcggcttcttcgtgcgacatgacggcgcaattccaggtcgtgagcggctgatctttataccacctcactagagcaggtttggtcattacatgatgcggtggcaggctcgatcgaccgagattcagatcttcgaacaggtaaccgatgtcatctgggctcaggggacaacgtctgcaagaaaaggaatcaatgaacgagctgtgatggatttcgcctttgatggagactcactttgcattgttgggttcggctgtaagtttggtctccttcgctgctaatccacgctcaaggcgatcatatagcttccaacgatgcttgaccggcattgcttgctcgagcggcttgctcgccagatccatgatgatataggtagcggcatgcagtccaaagatggaaggcaacggtcctgatggccgggaacctggcgtcagctcgtcagcgaggcgaactaatacggtcagatggtctcacccaggactggcaagattcggactcggaagtcgtcgaaaggcgacaattccgtcgttttgcccttttcgaattcttcgtctggcaaaggcagaagtttgatttcacctggcacctcgaaagaatagacgactctgtggcgatcaatgtgatcagtaaagcggtggcggagtctcgttgggctcacttacggaatcccatgggtgacacccagcttccgtaaccgcaccctgatctgcttcgcaaggggatcttcgtatgtgttcgaaatgtcggcgatttgaattcgagttgggtcgcatttggcgcctgcacccatacttgcgaaaacctaagatagagttggctaagcaaagtatcgtaggcgggttcgccaatctcgagcctaccttgatgctgttcttatgacaatgtgccaacaggtcgacctgatcaggaatggtgccgtcagctacagttactatggattatgggaatctcggccgaagtatgaaggcttaccttcgtcggcacgttgtcgatcgcatcgactacccaatctgcaccctcgagccaactttccgaggattccccctttttccagagtcctacttttgtatcgatcctgcattcagtccaagcttagaaccgtattttggcctggctcgacgatcttgcatcgacttaccgagcccaaggagcgatcttcttcaggaatttgcgtgtggcttcgacctttggaatccccacgtcctccatcgttgccgcagcatgtcggttgagcgatgacagtgtcgtcatgtcgaactgtaacagcagatgagtcaaccatcttttcggaacgagcaagcaaagaaaaaatgctcacgtcgatcaatagcaagtgttccacgccgctgaaatcacaggttgatttgagttacgccccaagcaccaaacatacgggcgattgcagtaacggcttaccttcgcagaagcataagtgcacaccagcttcccacacccccgcaacccacaattacgacgtaggatttgcgcaatttagccattcctgcttcgcccaggaaactgtagttcctggatagctacaggtctcgcatcagtatgtatgcagtcaactatcgaatctacgaggtaagcgctcgagctggctatccgtacatacctgctctcgaatcaggtcttcgtcaaactgtcccttttcccagtccttctggctggcgtccctccgcacaggaccagcatctgccatcgtcgagaagtgttcctcctcattcccagtactagacgtccatggctcatctgaccctttcagatcctcgtagacactctctttgagcttttcggtcctcgcataacgtcttatcgcttgtccgccgatgatcgcgcccgtggtgatcagggcggtgcccacagcagtaagagcgatcgtctgtcgcaacgagatgttactactactgctattcatattactgccaaagccgtgcgactgtagtgtgatcaatcaaatggcgagtagatactaattgttgcgagggttgtgagtgaccctcaagaacccgtcaagcaaaggctctcctctccgcctaacctggtcttgaccctcaaacgcgtctaacctcgatctcgacctcgctcggtcggttcatcgatccctcttcaccaccaccattattgcaatctcgactggttcaattagtctagcagccaacctctgacgattcagcgatcgtatttccaagtcggaggagaccgcttggtcatagaatagccaggctatcatccgcctctccagcaggacatcgaaaacggacctcgatacacttcgcgcaactcggtagttcggtagattgcatcgcgcacgacgtcgaagtcgagtctcgctcgtcacttacacggccatgtcagcgacctttccggggaatcccaaggtttccactgtacttgagaggtacattagccgtccgaacgaaggttcatccgcagaagtaccggatgtcagcctgctcgaagtgttccagaaagggctcgacaactacaagaaacacgccgaccggcgagtcgagtccgcacaggaagccgtacggatcggacaagagactttgacgaggacgaggaggaaattggagggtcaaacttccagtgggaaggtcaagacgacacatcctggcgatgacgatggcagaaagtcgagcaccaaacagaaagacccgctgcatcgttatgggtcgagcgcctcccgagacctcgaatctcgtccgaaggtgcacagcgagaggaaagccaacggtcatgatgcttgggtaccaaacacgtctgttaagagtccactccccgtcgcgaaattcaaacgggaactgcctggttagtcgacttgttgttgcccaacactgtcccgagcgttagatcctgacgacacacaccttttacgctcttcggttgtccgcaccagaatcaccacctccatcggaatcgccacggcaaggatacgctgatcaggaagacggccgttcgatcccatctcatggagctcctttacacaagaagaagaagcgaagagtcgtccacgagctcagcccggagactccgctccgcgacactgcccaccgtggatccagcccgtatttcgaactcggatccgagcgagcctccgtacccccacgagatagggaacagagcgtccgatcaactcgactagagtccccttctttgccgagcttggcaggacctccaccggttgacagtcggatgccttcccctcgcccagctatgcccctatctgcttctaccggatccgcgcccaagatcaagctgaagttgggaagcaataaggtaggttttggctctcgcggtggtcgttggatgttattgataggcgatccaccgaatttcgcaggctcttacggtagggtctccacacgcatccgacgcggtgcagcaattcatccatcccgccctcagcttttcacccctccgacctggaatcggttctacttccatgcatgcatcttcatcccgatctctcttacctcccagacaaccgattcccgcgcctgcaccccctcagcccaaacgacaaaaagacgtcaaccatgatttctccaccgtcaagaacgtcgcccaaaccgtgcaatggagcacgttctggtcgggaatcgagacctatatccgcgacgttggtgaagaggatatcgccatgttgacattcaggcccgacgatcgaggtatttacgacatgccgagtctcggtcggcactaccaagacatctgggacgaagaagacatgcagttgccattcagtcaatcgaccaattcggcctggtccgcttcagcaaacttggcgcctccagcatttcagcgagacaaggagcgcgacgttcttggtaacaggatcgggaaaggcctacgacgcgcttacccaaaagacctcagggaaaccgatctgagagacgagagaaaaggaccagggctgttggaagagagaattgttgctggtttatgggagagtcggccgaatgggccgaccaacggcatggaggaccacggagctcgacaggcagattccggcgaggtggtgatcaaggacgagccgggattaggcgagactcggagatttggaaatggtcaaactgagcgaactggaaagtcggcggaccagcttgccattgacgacccgtcgatctggccgatcgcgccgcagcacgctggattcgaaattctgaatgcgacgatagtcgaatcggaagaaggcgtcaagagagaacttcgacatctcggtctcttggatgcgaacgaagaggtgagcttcctgaaacgtctcgtcattatcgggccgagcacgttgcagtggattgattgtgaccttctcggcacctctcagatcgattggacacgcaaagaggacgacgagattgccgcagcgctgcgccaatgtcaacgcgctctaagagatcaggtgacgagcaacaatgctcggaaagaacgtctgacgggactggtcagagatcgattggcctatggcgcttatgaaaagtccttggaagggctggaaaaaaccatcgaaggggcttggttgaaacgttcggcgaggaggaacaagaagcaaaaatcgagcagtcatcgagaagaaggcaattcgattcgccgacctggagaaaaggtctccttgcctgacaacgtcaagcaagccatggaagcgcgaaggcgatggatcgatgccgttggcccggtcttggaggcaccagacgtgcagggcaaattcactggtctgccggagaggagtatttatgacggactggaggatttgaaggatgatgccacgggacggacgtggatccagaccatatcaaacgactaaagcccgcaaaaaccgtcgctttcctcatgttacggaaggcatgttcattgcaagagcggtattagctgtttcagcctgtcgatcgtctacaaccccacttggcattcatgttgatctgaccatcctcgatactactgtcacgagcacatatcgtcatgactactgcttagtagacatggccctacggagctttgtaaacaccattacatcgtatagtcgtcgatgtgatcccatcctaagtggtcactgtgtccctttcttgctcttttcgcgtgagaaagccgagatttggcgcgcggtgactttggtgagatcgtcatcgcgcgccaaaggtaaataggtcaattcatatagacagagacttggttatatgatgatatggacattagtcaaggttcaaacaaggcattcacactctacccctgccctctagcttctagacggatccttatcgtactagcgttgacttactcacgaggaaaacttcacggatcaccacgacatcacctcaaccaatggacgcggacaccaacatggaaggtgcgccgctagtgcgagcgagcaggtagcttacaggtcaccagcttacacgcacgccgtgttcacctacagatcacaacgaaagaggtagagaagattcgagagagaggagtcccagagattcggttcgtcgggacgagcgagaaccggagcgcaggcgaagcaggagtagggaacgcgactcggtaagtccgcaagaacgacttgcaccgagaggtcacccttgactgcaaagtccttccgtggtggtggttctccaaacttcgcggggtcacgccggatgaccagccgatacacaatgctttcgaatgcaccgggacttgcggaacgaataccgtcccgtacttaaagttatttatcgactttcgcgatccccaaccttctcgctgcgatcagcaaccccctttgacgacgccgcttggcttacttgcccataacattcctaccagcagcaccgtcgtcgtagcgccagtcgctctcgctcgccaccgcgcagatcataccgacagcgctcgcgatcgtactctcgtgaccgaagacatcgaagccaccgttcgcgatctaggagccctaggtaccatcgtcgggacgaacgcgattatcaccgcagaccgtctcccttgagaagccaaggaggcccgatgaacgcaccagcagaagaggccgaggcccatgccaaacagagcgtcaaggaaaacagggtctattgcggcaacctgacttatgccactacgtacaaggatctgacggactatatgaaagagggtgggtggaatggtccgagccggtcgtcggccggggttgctgccacaggttgaaagatggggggtcagggtgcggacgtgctttcgagccaacaacgagtcgagctggcacgaactttggcatcgaacaccgcaccgcgtgcacatggcgaacccggccgaagatcggttgaaggagcgtatcgagttcagtttgttgacgaggacttgggggtggttgtttggatttgtcgatctcatagctggagaggtggcgtttgcggaaatctttgtaacgccttcgggacaatcaaagggatgcgggtgagtctttgcctaggataggcgccgacacagttgcagctcggctgatgctgtgatttatgcaacaaaccagtatcgtcgagtatgttgaacgcgaatctgccgagcgtgccatgaaaggattgggggaaagaatgctcttcgggagaccagtgttcatccgggaggtgagtgaatccactctcgcttacaacgtgcgagagcgcgtgactgactcgtcacaccgctactttttcgtgatctaggaccgagaagcagaagctcgatttggttctgcccccgttcccggaaagatcggagcagctttcggtgaggctcgtccgttgggaaggcctatggtcggaggtttcgggggtgcagcagcgggtccacccgccgattatcggcaactcttcgttggaaatgtgagtcaagtcgatcaagccaaattgtcccgctaagttatactcacgccggcggagatcccgtcgtacgatacagttgccatacactgctacttggcaagacatgaaagatcttttccgcgaagccggagccgtcatccgtgcagatgtggccatgttccctgatggaagacccaaaggaaccggaattgtcgtctatgagactcacgaggacgccaagaatgccgtcggttcgtcgatcctctctacaattcccgacgctttcgacctattaatgacgctatcttgatgtcattataaagcaaccttcaacggatacacatggcaggagtctatcctccaagtccgaccggtaagttgccttcgccctcgccttcgatgaggaactgttactaacaccaggttcatcctcttaggaccgattcgctggtaatggctctttccgcgggggtcgtggagggtttgcacctcgaggtggcttcattggccgaggcggtctcgttggacgaggcggtttcaatggcgctcctgtgcccggtcgtaatggacgtttcttcacaaatgacctctatgccgactacaatggtccggagggcggagttggaatccctaccggaccggcaagcaatgtagcttttggcggtgttgtcgagccgtccaagcaaatcatgatccgcaacgtaagcactatgataaacgatatgtaaactttgctcgtgcttccagcttactttgcctacgttgccagttgccatggtccacttccaatgaagatcttgttgaactgttcgagactaccggtcaggtcgttctcgccgaaattctttatgaagggacacgctcgaaaggatctggcgtcgtacaattcaaagaagtcgaggaggctgagcaagctggacagaaattcactggctacgtttacggcggccgtcctcttggtgagttgcgattgcctgaaacttctgtctattccgcgcagtcactcatcagccttggacaccaccccagacgtgcaattcaacgacaggtggcaccgcttcaccgagacagcggctcaggggtccaccgggattgcagcctaaacctttttcaatcaatcctgtatgattgtcgtccagacatccaccgttcacatccattcgtatgggacgaaacgtggtcatgcagaacatacttgcaatcgatatacaacctgcaaagcttgagatgctttcaattgactacaacaactatttcgcaaaattgccgtccgcgacgtcctgcaaagtccccctatccgtctctacctattgccatataccggcccacgtatcctgattctcgagtgatgggggctgatagaccgtgtctcctccaacttgttcctggaaagccagatcatcaattcccggattgatgccaccatgcagcgcagtaagcgggtatatgtagggctgctgtgacttcgcagcgctgactatcgaggagccacctgatgacaagtgctgatagaaaggcaaagcggtcgcgttcaataggccgcggcggagtacgtcacgcgatacgacgacttacaacggaggtgttactcgagcgttggtcgctaagttccgctacatgttcgttcggcacgacattgccatcgaaattgactgtaggatttaaaggggattgccgcttcttttgatccgacaggttgactttttgtaacatgtccgcgggtctgtgcaagcagcaaggggtcctccttgtcaataagagggaaccagacctccaatatctgtcgaacttacgctgaagctcgccttgagttcgcatcgaaatcgatagggagcatcaaatgttcttcagattgcaatatcctagcgccgtcctgatcgaaatttgcaatgtaaggatattccccgatcgtatccgtgttagaatcggtcgtctcctgactaaacatgctcgtcatgctcccaatccggttgcggtacatgtagttggctgagggtaatccggaatagtccgcaaagggtgtcattaacggcaaggacgagtcattgacgttgatcggcggggcgttgggatcattgaaaccgaacgaaaagcctggattgggcagaggtccaggcacagccgtcgatccgttcagcggcgagacctcgtcgaccgatccgcgcatgtcagtcggagagaaggccgacaagagagacgtatcgaacggctgctgcgaatcctgatcggcgattgggctaagctcccgcttgttcgccactggttgccgctgagaggaagcgccggtccgaggtggtgtgaacgatcccaacgagaacgaacgcgaattcacaggtaagctggctcgtcggcctccaagcgtcattgccagatgcatcgggatctgcgacttggctggtcgatcggtaggagatacgagccgattgccgggattggtgacaatgggaggaggatacgggaggctacctcggcgaccttggaccgaggggaccccgcttcgggcttgattcgggacgtaggaaggttgagcgcgaggaaagccatgtgctggagagtgctgattgaccgctgcatccagtcccgttggtttatgcataggattggtttgccctggatggccgttcttctccggcgcctcgtatagcggatgacgactgctccatccgtccaattcgttcgttcccgtagtatccaagcgatatccgtgaacgggcatgccctgatctccgcgaatatgcagcatcgcaggatagccttgcgtcggttcgggctccgcgtcatctccatcatcatcttccgctttctttcgctccagcattttcctcttttgccgcctgacagacattcgagaacggggttggtgccaagatgagccacggtagatggctgggagatagagcaaagcttacctgttctgaaaccatacctgcacgctgcgcggtgtcatcccgatctgatccgccagcatctttcgcgtcactgcgctcggcttgcagttctcatcaaacgacttctcaaggacggacaattgctcaggtgatgtccgcttgcgatgcttgacctgcaacacacgaccaacattcagctattttgtcaaagcttttcgcaatcggttgtagcctacctggtatgtatcgtacatcgtgctatgatgaaactgatggtgaaagtcaaggctagcgtgttggcctgcgcccccatattcagacaagccatattccggctgggaactcaagtgaccgccaagactgcctcgacggaaactgctggcgttcatcccgttctgtgctgcgcggccttgcatcgttggggcattctggtgccacatgggaacagacggcccgaacgaatgtgagactgaatggttttgtaagggaggtcgatcgatagagtatgtagcttgcgccgcttgtctcccgtactgcggaaccgcctgatgcccgtagccgctgccataagagtagtgattgggagcagcgaacgacatcatctgaccctgctgatagagcgccgcaggggaggaagccctccgaccggtattgctcatatgaagcatgcccgcatcatattgagccgggaaacttggtccagcgtgattgccagtgtggggaggtatcggggaaggggacaaggaatcgatatagggctcgtcccgattcgtaccggccgaactagcatggggactggtattgtgcagatacggattcgacgtgatcaatcctggtggtccagcgtggatggaaacagcggccatggttgagggacgatcttttcacgagttgccaggcggtcgtatccgatagggaacgtttgtgcgaaccggaagatccgtcctgatgaagaggatgtgcgaatgtggatttgccctcaacagtgtggtctatggacgaagacgcggcaatctcttgaggctgacgttgtgaaacggcaggtgaccggttcgtagagattcctgcgaaggtcgatccctcgccgtaattcaaatgaaggaaatcgagatgaaagcctgttatagtggtatattgcggtccgggcgattgcagggtctcaagggcggtgcagcaatctgagtttgtcggtcccctttaggacaaaggaatctgctcctgaaagaatcactgccagaggtccagagacgggcgtctatccgctcacgttaggccgaggagcgtgtggattggcgaagctaaaaggcgattcggcggtgatgcaaagatacgatttctagtgcattcgcattatagtggttgcgatcgtgtcggctttctcacttgtcccgagtccactacttctgatgaccacacagacgacgcgcacggtcgtcgaacaacgtcggggtattgacggtcgattgggaggtcaattattccgcaacgatccgctagtctgactttgcctttgattgcgatggtaggtcaatttgctcgtacgttgttatcaattgcaagcaactgatccatacgcaggggttacaagccgatatacatcgtctcaaagtcgagatccgtcacagattatagatcgcaggcgaacggatagaggtcgttcgatattgagagaaccatcaatcaattccgccatcccctgcctgcctgcctgcctgcctgcctgtttcatcccctgtgctctctgcccgttcatccgcgatccgtcgatgaagggaaggctcgattcacagtcttggaatcgacgtcgacactgctgttcccccacctgccctccgcctgtcgccatccccgctgctgctgccgttctggccagcctgggcctgccccagccctcggccctctcgcccacgtcgtcaatgagcttcttcggcccggacctggctcgcttccgcttccgtgaatgccacggcctcggttcgagtcaaagttacttccaccacgttgatcccggcactcgtatcgacagagaccgtacctcgtggccgagtgagcggcgccatcgcttcttccggccttcgcaaccttctgcctcgggcttctcagtgctcgcctcgccgcgtggaattttcaaacgccggatcgcgaattcagacccacgggaaaaaggcaggtcgtcgaccatagagccaacggacttgacgatatgatgaatgtccgaacgattacagaatatgaccttgatctgaaactgataatcaatctatttgtgaggcagcacacattagcaggattacggggcagcagctctcagctggctcatgtctatacataagatgtcgcaaattgattcaatgtagggtccaactgatatgcattgttgccaaatctggggctggtagtcacatgagcaaacacagagaccatagacgtctgttacggcggagcttcgctaagtcgcatcggttgtatatctaagtggcagtatcggtacgaatcgcaggtagtcacagcagataacagagccaaatttggttgctggaagcgaattcggttgagatgatacaaatccgggttgatgtacggataaggaagtggtttcgctgtaggtaactaggatcgagtgcttggttcagtacgagcggtgagacatctactacttagcaatgtcctggattgtaacctcttcacaatacatcttgaagatgcagtgttgttgcaaatcagtaggcgtaaatagaatgcaatattgaaacttgacccttctagtacaagaacgtcgtctgccagattcgaacaagtttgactaagtatatataccacgccaagagtagttgtagcgagttgagaacaataggcgatccaagaacagtggagcaaatttggaacaaagagaaccaaatcaggggtcaagagtcaaacctctaacaaagaggagtcgttgtttgctgagtcgagatgtctttgtctgatgtagtcgtttgtcaagctatgaggtctttgtcgaatatccgttgatgtcgctattgttctctaatggtggtgatatcgaatatgcgttgtgttgatagtacagagggtgacgagagcgcgcgagccaaagccggcagcgtagaagccggatccgcgtcgctcctgtaacaacgtcacatataacctttgcagatttctgaaatcaggatagtcaagtcagcttcatgttacgctgccagtagctcatagtcctctctagaactcataagcataatgtgttgaggaggtcactgcttgggttgacaggcaacatccgcagcacatctattcaaatggccatactggaccatcaggtcatgggctccaagggagaaatcattggagaggtccttggaccagacacatagcatgctagaagggaacattccgttgtttatatcaatgccatagggctggtctaaatctgttgtacaatcctagggaggaatctcaaggtgtaagtcccgcatggggcacagaggaggtagccctccagcatatacatggttttctttttttgctaatgaagcatgtgatgcaacatgcagatatctaggtgtgtagtggtgtcactgccaagcctcatacagcaagtcttctgtgttgcataatacacagatgcagattgccagaggttaggctaagtaaagacctgtttgctgatgacctattgtactgcattatttgacgccttaagcatcacttattgcttcgtcacaacgacccctacctttgctcctcttctgagtggaacatataggtgaagccctaaaatcggtgtgcttcactgtgacagcatttcacaagtcgtacaaagaacgtcaaaaaggttacacgcgtagcatgatgtccttaaagcattcccatgaagacatttgaggaggtccttggagcatcctatggggacggttgaatagacgtcttcaaagcatcatgttacctacttccaaggaaccccagcgtgagctttgaccaggaggatagcaagctatgcggtacttctggggtgcttgaagtgtaccttgcatcttggttgttgatcctcttgtcaagagaatctctttagacagtgagagcgttcacaggaatgaccatagtgagttgagtccgtgcagggcaaactgatcctatctctggtctcttcctttttgtcagcctatctacaagcattttgccaaggtggctattgttagggtggagggttccatcggaaagtttcatcagagcagtcagcgggagaggggcaaaggcaggggccattgtgtataagtaataacggaggcctaaggcatccgtaacatcatagtacagtagaacgtcaacagacagactttcactggaggcatcccctcaaacaccttctccagcgcgtctagtccctcagggtgaactgttgcctacagcctgggcggaaacagggattgattggtcatacgctaccagtacaaatcaatccagtgttggccattgaatcggatctatgtgctacaatcaaatccaatccaggcagatgattgctttgcaccgccttgtcgcctgtaataaggtctgcagcaattttgtgagtcattcatctgtttctcgtttcattctctgcccttctgtcctttccatcaaatgcttgtcatgtgtggtatatatgatatggcatcacaaacgatgtcatctgttgtcagtgagtgcacataatctcaaacacaaaggtttttctaataacatgctctggagtcccactttgaaggatgacccaggaagcttcggatttttaggtgagttgtggaatcttcgggagtatccacttgagcatatctcttccttcgctttcttgtatactatacattcatgcagatcagcctgtttcctcgctactgtgccaatgcataagctacattagcaataggttctagctacaactattgcctgagtgcatcaagtgactagctgtttttatctggacattgcttctcaacgattcatttgacttggtagttgtggactaagctgtagctagacacagcccattaagagactggccttcactgcacgattatagctgctggacaaattcagaaaagtgattcacatcactgtggcggtagcggtagtctccaatccagtctaatctagttgtagcaacataggagtgttggatgacgagcatcatcagtcatcatcagtgatggccaagaatattgtaggcagcgacatgactcgaggtaacacagacatttgacttcgaatattggaaaggcgtaaggtaatacagacacctcaagcaacagtatgaaaagagacttatttatcgctacggatcgtggagagaaagctctgttggaagatacaatcagagaagtgcgcaggagaagcgtgaagatgtgcattatggtgtatacgcactgacaggtctctaaggtagccacacattatcgcaacaataggacatggacaagcgggcttttactctattcaccgtctggcaatatgtattggcataacatgagttgcacgcttcacagatgtctgctgcatttggcacaaccataggaacagcattgctcctcccagaaaccgttagggttaggcctcagctaactcctggttacctcacatgagacttgaaccttaggtctcctacctaggattgtataacggatgcagcactagctctactacagctatctacgctatgggatatgcctctctagcctcctatgtgtttggtttggggacctctcctaggaatcttccttggagtctatcacaagacccatccagggggtgttctgagccccactctgctgtgatgaaatgtggtaggtatctatggatactacctattgacctgaacagtaacagtcgcaaacccaatagttgaaacatgtgtatggatggatgcatacagaaaccaactggtatatgttcccactgaaatctgtcaaaagacacggatgacaaggtctagatgaaacagaagtcaactatcactagacgtacttgaatgctgtgaaaaaggtcagaccataaggacagttgttttggcaaccaagcagtcatacttgcagctatgtcaaaaactcaccaggtcacaacaccatacttcctgttaccgatcaggccaatagtttgtatctgcggatacctaccacaatataccatggcagacgacacctcagagtactccctgggggggtaacatggaggactctggggacaatcccttggggaggtcctcataccagacacttagaacactagagaggcatattccatagtgtagacctttgcattagaactactgctgcatccgttatacaattctaggtagaagacctaaggtgcaagtcccgcgtggtaaggagttagccaaggcctaacactgacactgggctcctattgtgaaacataaaacataccatcaggcaggtaacctacctagcaggagcaccgcaatacaggtgtcaatggtacaacctctgaagcgactccttggactacacatctacaattgcagatttttcgtatgcatagacggacaagcagacttgccctcctggctgtaatgcggactgttacaacgagtttggtcttgaattaccttacctcgttcgtatggacatgaagctgcggaaaatctttctgcattgcccctgaagctacgcaagattttggggaaaggcttaccgcaataatggacagcaacagggggattgttcagttggaaatcaggggcgagcacattgaggccgacaataggccgttgataacgggccttcattgctgacaggctgctcataacgctatagggttatggattgccttgcatatggcaaagggaggagatgagcggcctcgagcctgtagtaagggcccagacgctgtagatacatcctctggaacggatgcctgagatgcggtctgcacagatccctgaactgagccaaggcctgacaacatcaattaagcgaaggataaacagcaggaaataagtcaggtggaatggcagataagggatctatccagtacagggtgatttaatcctacttggtagtatggacatatgaacctctccggaagagcgctccaacgtgctctagaaggtggttctgtacatgtaattgagggacattcctgcagacaactaagctataatagcatccttacaggactcaagatctgacttttgtgggtcagctatatacaagaaaatcgaattgatcagggacattggaacttagcaagaagccgaagttcttctgcaaagacatctagctgagtagacttcaaatgtatctttgcgactcagctcaatgaaagaagacagggaatcaaatattaagaaagagctatagcacaaggctaaagtcaggagtttggccaagcatccttgatcctgtggttgggcttatctcgctcagaatactgctcaccatggtatcagctcagatttttgagctacacaagaggggtgcagagactactaccctcaacatgccacattggaagaagagttttgagcagaacaagaggtcaaaaggactcaaggcttctcagattgctttagaacagcaagtattcgctcgaggtaaggtgcaagacaaatatcgttcaaagacttggagtttggctgtgcatctaagggcaagggttagactgctagagatcggctgtactgagatatgaagacaccaaaatcccactccaagtaatccacccaatctgaaccataaagtctgcatgtgactaattgttgtgcacagaattgatcagcaatggaggaccaacaatggagatagaaagtatcaacaatgagcccaggcgttgtggaatgtgtcgtctctattgttcgcatagtatgacgttcttgatagaggcagagaagcaagggactctcagccgctcaaatatgcttcttacttccccggatagccaggattacatactgaacaagcccgtgtatgtagattagattgctcaagcagcaattttcgattttgcaaatactgcatatgggaccggatcactcagacactacatgcagttccagctatatgacattgaacccagataattgacattggatgcccaatatcctattttgcacacatcaaccatgcagagaaattctctactgcagggaacttgaatgggtgttttgccagccaggtaatatatagtggtacgcaatgtggacatcatgtaatatgtaaatcaatagtgatccttagtggctagtctgcgtaaaactcaaaatccagtatctttcaacgcaaacttgacaggcagcaaacgaaccctaacaaaagctaaacacactcgcttcatattgtttttaattcttcagaatatgtctggatggtataggtagggaaccaccaggatgaaaaaggtgcactgcagagagtgggcatgcggatgtttgtctactttcttgtcagtgctgagtgaaccaagattgattggtgaggagggctttgtactcagcatgttgatttttttggtctcacaaggaccaaaagaccaacctccttccttgtgccctaacagaaaggcgccctggcagaccctcacttctgacccgaccgccaagggatggggcaatcagtggcaaattgcacccaaagaagcttgcctttgttaacatcaggcctgctgaactcccaatgccatatagtgttgcaaataggcgtcccttgattggctcatggatgcaggaagcaatctcaagcacaaagggtcaacacgtgactaggatcacatgttgtgactggagtcacacttatgcaactgaagtcacgcttatgcaactggagtcacacattagttgcgactcatttgcgactggagttgcacttatgcgtctgagtcgcaaattcgcaacaagcctagtcgcaagtacactggcaggacactaggaggacgtgatcatcagaatagtatatataggagaccatctggacctcatttcctttccctccacgatgtactactttacttttatgcaagcaacattgatcatcctttcacagcaagcatcatctatcatctgcaagagacaatagacatagtgactacaaccattgacaaggagtggctacacaccattggcagcagccaatatcacaacatatagcaatggacagggatgaggatcaaagaatgcgagcttggcctagccaagagcccagacttacccgataaccattgcgcgagcctggcttcaatctgcacctgaacagttctacagcccaatcctgctatagccaagattgttgtgaagtaacaactagatccacaaagattggttacttgctgggtctaggcaatagcaatgatctattgctagtgctgatcttgccttgttgtgaaggggaatcaatgttgcttccataaaagtaaagtagtccatgagaggaggaaaggaaatgagacccaaatggtctcctatatatacttttctggtgagcatgtcctcctagtgtcctccagtgtggttgcgactaggcttgttgcgaatttgcgactcagacgcataagtgcaaccccagtcgcaaatgagtcacagatgtgtgactccagtcacaaatgagtcactaatgtgcgactccagttgcataagcgtgactccagtcacaacatgtgatcctagtcacatgttgaccctttgtgcttgagattgcaccctgagcatcacctatgatgtcattgtcacgtgactctagtcgcgcgcgccctctagtactaggtacttagaggggtaaaatacttagacatatattcatctctctttcttacatacctattgaacttcatcaatctaattgcatgttgttcaataggtaagttattgaaattgtacaacttaatgatatatcaattcaattgcatgttgttcaatagtcaaagcatgccaatcttcaacaaagatcccaaaagagagttgctgcgcaaagtagtagatgtgacgtggactgtgcgaatgtgtttgggatgtacccccaccgtgggattgagcagagaacacagagctggagcttccttgaaaaggcacttgatggttggtgtaatggctggaaagttcgcctgcccagagcttggctgtgatgaccatgggaaagatttgatagtatcaaacaaactgcgcaaagtcaaaccagctattacttgggtgcttgcccttcagtagggctctcaatctgcctagcaacttcgaattccgcgtgacacagctatcgtaaagctcaagcaatcttcagcaactgatttacgagctagatggcatagaggcacgagtataactcacctttgcatcaagtacgtgacccgtttgccttgcgtctgattgttcacgggatctatttcttggttgaccaggatctgatagatctgaaccgcagtcggctgcacttcattgtgcccctgtgtgttgagccaacccattccaagcagtttgtccgacaaagtaatcctcaaacgatgcaagtaccttacggctcctgttctgctggtattgccaggacaggcatggacatgtagcctggatcacaatcttcttattccttgcaagattcgttcggcaaaagctgttgctagctagatcaagctcatcaacctcttgaggttcttgtggatgagacacatcttcagtcaggttgatcttgtttacacctgcattgtcggactctttgggtttatcactggagagatttgtatcaccacaaaatcgcttgaagcgtcatgcaacaggtccttcctaaggttgaacgtcctcaaataggttggacattatcgtctggaaggcgcggagacatctatttagacaatccctgacttctggcacttgcatcacccctcgtgtcaaggtgaagcgttgcatcactgacatgatggcatcgaagtgaggtgatatgtcaactggtcaagacctttggaatgtagcattgaagagatcatgatcgagacagatcgcgtctgcttggtgtaaagatgcgactgtgatcattcatttgcgaccacaatcacatcttgtgactcctgtcacactgttgcgattcagccacagaactgcaactgtgcacacacatttgcgacccagtcacatattcgtgactactctagtcacaactcttgtacacacaccactagccctttggtgtatatataggagtccccagaaggaggaaaggcatcccttttctcttctcttgtgggaactcagaccccttgacaccaggttcaatactcttacctttatccccttcttcacctttcacctttgactttctttcaacaaggcttagctacccttgttgcctattcaacaaagacatcaagaaccttagacttggtgttgagacaactgcaagacagacatcatcagctgtaagagcaccttttctctctctgggatctggtattgttacacttggccggctcttgcttgcttgactgctcttgttgctaagctgcagggtttggtggagatggtgacgtcaaagctgtcccatcccggccccaccacactctcaggtagtagtaagccattaacagtgataagcgcaaattggaaacatcttgatatgacaccaacgctgacctgttctgagtagccatctcttctttgccgcatgtgcaaacctgatacaagcagttccttgctctggtagcttataaccaggaaatcccctgctgtacctcaagcaagataccatttttgtcacatcccttgactactgaaggatgctctgtgagacagcaatcgatccgctcatactgttgtcaagtgacacactgggtggccttctggaccacttgatcgaattcacatgaaactatagctgcaggaagcccgacactggtggattgatgtgcttgtttgctagagaccccgctgagttggggtacgcatggattttggcttctcttgcgccccgctgtctccctcaatgatgttattggttgaggttgtggttgaaagcgcagagtaaagtaactaagcatgccagagaccgatagatacgtagggttcttccacgccccaaaaggtgtaacacgctggagccatgtcagccatgttttcatccaggaagaatagcaccacattgatcttgaaatgctgagcaatgagactgattatatctgcagtggatgattgtctgaggttgaaaaatgacgtaaccctagggcaccaagaacattacatgcctcaaagtcttcccctgctgtgaccccgttccaactgcctgcacctttggcaaagcaatcgaagttcttgcatcgtattgtaactggttttgtgaatttgcaagtggggatatcttgggatattgccctgaaggaaccgtcgttgtttgcaccagatgtcttgactttggccaggagcaatggttggccatgaaggaccacgtgttaggtgataaccatgttggagaagggggatgactctcggctatgtttggtacgggacaagggatgcatcagctggtggctggaacttacagttgatacgctacgacctatctgattgtactgacctgccgagcgattctcaaccaattacagggcgacaagcttggtcaatcttgatggggcaactaggattgttcacatgtaccttgaagaagtgctgaaggtcatcattgttcagccgtgcacctttctcatgattggtgtcctggtagtgcttttgcctgggaagacggtcaaagatgaccggctattgggtattgtcagcaatcaagatggagaaggctgtctcttggatctgcccgatcctgtacatccgcccggtcatctgaactttcccagaccatagccaaggtttgcctacgatgtgcttcttgtaacacacttggctgttatgtgagcaatgagttgagggaggggactgatcaaatcagctcatgcccacaccaaagcggcttcattgacccccagtttaagcgactcaactatgaggttgatcccggccaagagacagatgggctatttcccatcaggggagacttatctggatccgcctgaaaggcgttgcctcccaggccaaatacatctgacatctacccagagtgcgtctggtaatttaagagacacagattgccagaggcacttggagtaaaaattttgcttgttgatatcctatcgttattgcttacacacaatggcctctaaatttgtaacactgttgctgagtttttggcaaaaccttgcaataaagcctgccaccctaatggacagccacaatccaggacaatgctgtacacaaaatacacctttctattgcaagacatttcctcattctactgatttgtactacttaactggtccggtgatgcgctactagtagggaagtcacctgtagcctctgactccatttacgattgaaaagagatgcgacgtgacatagcaagctatgtcaggcaggtggttgcgataacagcgtcgagttctttttctgggacaaggaatacgcgtacatgcgtatttaccaatgacggaatagttcacccgggccaaaaacctacgggcgaacattgggctgcaggccacacagtgctgttccagtccggaacctacggaacaagatcttagccttgcctatataacgttcgccttggttctcgaactggatccggccatgcccaatagatatctaccgacagatagttctcactatatacgatctatcacaccggctgagaggaaatgacatcacgagtctggaccagctgatatgaagtccctccggagcgggcgttactgttccacatagcacgcatgcgtcgatatggcgagccttgaactctgtgttgtaaacctaggccagtgcaaattgtcaggacttgttcgagttgaagggatcaaaggtgggcgagataattaccttcagtaggaatcgagtacagctctctgtagtcgacgtccagggcctgacctctagtccagaaatcttcacaattctgcttctgatgtttagtgactgagattgtcggacctaactgatctcggtactcacggtcacgattcccatatcgaaaggattaccgccgcctgcttccgccagcttcatgcccctacccgcagcacccttcgtgaagcgatcaagcccgagcagttgcaagagagggccgttggaacagtatctcattgctcctcctactagtgctacgcaagggttattgaaagcgtgctgtcgagcaggtaacgctgcctgtgcctctgtgctccccgtattgtggccaccaaaaggaacaggtgtggaattgtcatttgactcgggtgcgataagaccagcctcctctgcccctgcttgacccggtccagctcctagatcgatgatattcacctgtcggccatgattatgcggcattcccgatgctgagccttgagtatgcagagtcatcgcccccccttgttcacgaagacttgtgcctcctctcccgcccatgaagccatagcgtccaagattgctgacttccaaggtcgtcatttgacgtgcaacttgccatgcttggcttgccaggagtatcgtcgtccaggtcaactgaactgacgaccatattgccactgcgagaaggtacggtgactgatgataagcgccgcaaacggacggtagtgtttggcaaaacgtaatgtatggcgacgggtcggattgataacggggtccattttcggaaaagtctaccccgtgcgtcatgcaatactgtcagcgagatggtagctgggtccctgaaactctgcgactcacacgttactgtgagaacatcgaaggcagcgattccaagcacaaggctggcgacgaaagacaggaaattgggatgattattaaatccgactggaagaacgagcatatcagatagagtgcgtcaggtcaggttcagctgatacttgccacaattccatatccacgggcaatggctgtcacccaaaagagagggagatgagcatcaggtctcttccccatcgcttagctcacatactggtcgaatcggcctgtacaccggttacatagcctacagtgcttcccccgaagaggctttctggccttcggacaccgtctcaggttagcgacggcttccataactagcgaagtagattcgatgacgcagaacttaccatacagacaatgcaaaagtaagttccgttcagggtacctcccgatgctagttgctcgatcagctggaccacaggctgtggtaagctttgtttagctgggcgtcgccgtcacagccatctcacctctgtgagtcggtcctcggaggtgtctggaatggtccatcccgggtccagccggaccgcttgataaaagttgtaaatgcagatgaacaagctgatggcgaaaaaggcattcgccgtgagatgtccaggagtgcctttgaaaggcagattttaggatgcgaggagtggcaggttggccagcgatttctgctcgagtggagccgagactcaccttgcacgaggagcagaacccaacaaagggctacgtgaaagaaactgcccgctatgattgcagcgaagtaaggagacttggtgacgccgtcaccgaagcctttggtcccaagaagagtctttgtgatgagctgaaagaaccatcgtcaggctgggttcacattcgcatatccaatctcgccgacacagcttacatggtgttggaggaagaacattgcaatcgcggctggtattccacaatatattggaaatcgagcgaatgccgaaaaagaaaggccaaaggacaccgtaggtccaacccaaacgagtctattgctattcgccttgtttgagattaacagcgtgataccctggttagccatgaagcataaatgaatgaacccttatatgaacgcacctcgctcgtgagtgaaagacgttcgagaccagtatcgtcgagaccggcatcttccaatcctcctttccacgggccgatagctttgagctcgacggccatatctgcaggggtctttccattgtcctccttggcttctacagatgcgccagctgttagcagtctagagatgcaagctcgggaacctttcactgccgcccagtgcaaaggggtgagttgtgccgcgtctcttgcgtgtggagaagcaccgtgtttcagaaggagatcgatagatagagcatcgcctgttcaggaacgagaaaggtgtaagccaaactctgatctttgtgattcgcgcaccagacttaccttgccaagcggcccacatcaacgaagtgtggccgtccgtgtctcgatcatctacaccaatgggctgccgtaacagatacagcaatggcatgactgcggaagagtgtgtgaccagatgaagcgtgttgaagccttgtgcatctttcgactctggattggcagatcgtgacagcagcaattgtatcacgtagagatgcccgtttctgtcatcaaatccaatgaactcgagctatgtggctggtgcattgcgttgccgccgactgacctagccgcccattggagaggagttgcttgaagctcccctcctacgacatccactatagcaccatgatctatcaaccacctgatagagtatcccgttaacacataatcaacacaattaaaatcgtaatgtcatatgcaaaagttttcgccatatgcaaaagttatcactcactcacacgctctcacatgagcgttgatggctgcccagtgcagagcggtcaccccaccagcatccttctcgttcacattcaaatcctggtcgttctcagctttcgcctggaggagcctttcgaagccagcgacatcaccaatttgagcaagagcgtggatctatcttgcattgggggacgatgcagtataagccctgctcaccaagcagcagcattccaatacataccgagaactcgttcaaagttgggctttcgtggcctctaaaagtggctgtactgagatctcgaccagatccagatccctccccattaacaaattgttgagttgttactgttccggctgaagccgccttctcggcgggtagcggtagtggcatgagccggacggataaaagatgggcccgctcgccgttcgttgtgctgtgcctgtgtttgctatacgattcgcgagctctggcactgcaccgggatgaagtttggttcttggatcgtttatctatgagaactgtctctcgcctggctggtcgatcggtgtctgatcgttacgagtacattggacgggatggtcgagagtgtgtgatatacttcgagtactctaccacacgactgcgaccctgacctcggccgagtcgtcgctctcggtcttcgcgtgacgaaatctcgagcagcagctgcgacacgcaatatgcgacatgctgatccggccctcgcctaaatttcagtatatcggcctccaatcccagtttatgaaggtccacttctacagtcttccgttcgattaacttgtccaggaatttggctactgattgcagttttatggttcaacctccgctaacttctcttacacttcttacttcaacctcgttgactttatcttcgttgaccggccgcgccagccgcaaaccccagacttcccatgtagcgtactttgtcctgtcaagcgcgctccaagcgctacttcaacccacatgttaagttcgaaatggacgtttgtctctgcgatctctgcatgtcatcgagtctagcgagtctatgcatgcggaatgtacatatgtcaatgtcatgggtcgttgaaaatggtcatacaattccgagcggaacagcagctcgctcttcaagatgactgcggaacaaatgcgggacaagagagagttcatcagtctacaaaacaacgacaagtctgcactctatttgcaacatgagctcttgtacacggaattctgtcatatcatcaagtcccgtagtcgaatagcactatcaacccgatcgcgccgactagcatagggtaaaacgcattctcgaggctcttcagaccctgatacgatccgaagaagccattctgggggatcagaggcaccggcttagctaccggcgcattcgccctcgcagaatctgtggcatacaaacagaaagcgttttagcaaaatgctttaaaatcggagcgctaaggaggatctgttgcgcaccgaattttggcctcgcccctgtctctgacccatcaaactgcaggatctcagccaaaatagctggatccaaacctgtcaacagtgaaacacaggtcgttggacgatggcgacagagatcaaaagctgtattatcgcaagcagaattggcgaaggtctccaccgaactggcagcgtggcatgacagcacgctcactttgaaaggggggcggtagtcccgccagggcgagtcgatcggccacagtcagatcaaacttttccgctgccctattgccgtcaacagccgcccccggaggagcacctaagcgtaacacagatcggcgagttggcggtatcacgcatagcattggtcattgtgctctcaccttggtggataaaccagctggaggatgcggccccgttaggatccacaacttgatgctgaccccctattcgaggctgctcaccgccggtagaggcggaaggctttgacagagggtgaagttgcattatgtcaagcaaagcctgcacctggcctacgccgggtcgttgaccggtatttcttgcattcgtcgattccgcttggacattcatatcctggcctgtgaacgcctgggctagaccgaggggtccctgaacgatgacaacagcaagcagcgcgaaacagaaaaggcttatgaatgctgccggggagattgttaacatctgagcgcccctgtggtgcacagtaacacgacgttcacgcccgacgatcagtttatcagtatagtgtggcggacctctcgagatcttacgtcgaattgcttgacgatgctcccaaggtcttatccttctctttatccttttcgtccttctctgaattattcgaaccggaagacgcctaccgcgtcccattgagcgtcttcggcggctcaagttctcgaaccaacgcagacttaccccgtctgaagcgttcaggtgcggcaaatacttgaacgcccagtagcagccggcgaccgtcaaaatgcatagcacggcagcaaagggtgagactagagaccctggctgtacacttggcgcaagacccgccatcgggatgaaaggtggtggatattgcccataagcaagcccagggaaagcctgaggaaatgggtgagaatggactgtggggattgctggaccggcaccagccgtgttcgtggcagaaaccgtcgcggtgactgtctcacgcacggttacggttggcaaaggagagtcagacatgtcgtccagtactgacaaataaggtgcgcctatgaagctatgctccgttgctgaggtcacgctgagaaaggtccgctgcgtctccttatccagcacacggagccgtcgcacgaaacgtctcggcccttgcttaaaccagtttggtcgagatgaaacgatatcatcctttgttctctcacatcggtcaagcgaacgacggacgcaaccaaacccatacacgccatgggacgccgcgctctcttggcaggccaagtcgacgttgtatatcgagtcgttcccgacgttgcctcaattcgtattggtcgtattcgatttcctcccatctatgctccgagttgtttcacataacgaaatctacaacctggtcgtaacatctagacagcccaaggccgcttgcaacgggaagaggcgtgaatagtttcgagggcgccgcgtttccagttccaaagctctttctcaacgcttctcgaaactgaaaacgtttcagacgttggatgcattagcctcgagtccctttgtatgaaaaaggcgggtcacgcacagataatgaccaagtccccaagtctcgcctcggtccattgcgaaaaactccgcacacgccaggaagaatacccggaatctttggaaagaaaggacttgcagtcagctgtggtgcggcggctcacagtagtttatatgacatacctgtagaaactcttcctcccttcgtcctttccaaatcccttctgttccgcgtcctcctctagcagtttcattccctcagccttgctcgagtcttgcagacgcaaccaagattccaaggtctgcgcatagtgagtgccgggaatgaaccaggatttctgcaatacgagatccgattgaaagtatgtgaaaagatccagctgaacgtgatatcgaaacatcaaagtgttcaatcgaggtgtcgtggctacaatgctcgcgttgtctgtggtgtacttaccgaaggcatggtccctccactgaagaaatgcttgctcatccaaccgtcgtcatcctcaaactcgtagggtgtatccttgtgaacgaatacgtgaatgaagaccttgccgtggggtttgagccaagtggctactttcgcaaacaggtgcgggtaccccttcatgtgttcgaacatctcgatagagagaacatgggtgaatctggaaacgtcgatgcgaacgagtcggttgttaattccgacgtctgtacgattgagaatcataggtgacttactgtcccttttcctcgaaatcgaattgggtaaagtcgccggtaatgacctatcagagggttgcgaatagcacataccgtttagctacgggtaccaactctgttcccatggaaatcgtacctcgacatttccaaagcccttctcctggcaggtcgagtcgatgtggactttctgggtacgagagtttgacaacatcttgatgctggccttggggtacttctcggccaagtaaagacccaagcttccccatccacaaccgaggtcaaggatactcagaccctctcccttaccaggaccttgttctcctaggccggccttctcgcagtagcttctgagcataatttcttcggcgtcttcgagcgtctcctttgcaaatttgatgtctttggcaccgccctgtcgcgtcggatcttcgagcgatgggtagtagcaagaggagtacttcattcgaggtccgagacatagcttcaagaacgatgtaggaacttcgtaatgttgctcgttcgccttggcctggtgttccgccaaaggccggttgggttcggacagtttggcgatgaagtccatcttggccgcgtggttggcggctccggtgcctattccattctgtacttgtcagatatgctggccgcataacgctgttcaacgatgagaagctctcgactgacccttatcaatttcccctaggcggacccgacaaagtttcctgatgacgggtcgaaggaccgcgtctgggatccagccattgtcgagtgccgactcgccgtactcggtaattgattcgaaaatggccttctgttttgcgggagcgtcagacatgattgatggaggcttttgacaacgaggatagagagtgagtcgagttgaactgaagaggatgctgttgactttcgactcgagtcttatgcgaagatgaggtgttgcgtgatcctttcatgatccacgacaagtgttgagcccatgagcccacggtcatcgtcactcgcacactacgtgcactctgcctgctcgagccgctcgatcgatcgcgcggcctcctcgcgcgggcacggggggttcgaccggccatcacggcagcgacggccaaatgatgccgtcacttggcaagacacatgcctgcgaggactgagcctaatcacgtgatgatgatattacacttcatcatcagctcatcagtcatatacgctcggccaaccgcgacggtcgatcagggatcaggtcaaacctttgatcgcacgaccggagaggagaagcgagatacacaaccgcattcgtgcatatttacttcatgtttcctgcgtgatcctgcatatcctgcattgatcatcggacgatcttgacgcctaacgagaacagaaaggccgctcacggtaagcagtcaatggaaacatcatccccggacaaggccaaacggaaactgctaggcgtcatcaagatcatcgatagtcgcgaacgagatagaggcattccggcgccatgggcttatcgctggtcatggagattgtaagtgttccctattcagagcagattgcttccgaagatctgaagctacaatgggtgcttgttcagctttgtaatcattgtcgtgatctactcatactacgtcatggtggggagactctgtgcacccatgcttcagcggcgcgaagatgctcgtggcccaattgggcaaggtggtgcgtaagatctgcgtgacctctaacgattgttcggctgatgacctgccctggacattcatagtgggacttttaatcggtgaaacgctgctctttctcatgttctgctggacctatctcaaggtgagcctcgatattagatcgacaaggcggtatgcgcatcagcacgccactgagcataaaccatctaggcgatctcgacgtcaccaggactagcgcctgaagtaagtcgacacaaatgcgattttgttaaggctcattcgcatctgactagcgatacaagcaggttatcccccgcagcgatcctccaatagccaatgacactcgacaagttgatccgtcgaggatcacacaagtgaatacgacagaagatagtggggacgatgcaggtaacgctggccctctcgatggaggtagaaacctattaccagccgagttttctctcccggcgttcatggactcatccaatgagcgtgggctgacagccggcttgacgcctcgcaatcggaactccacgagtgatattgctcagagcgatggtactcgagcctcatcccacttcggaaatgagatgaatttggttgggtctcgggaaagcggaatccgtctaacgggagctgcgcatgaggaacgcattccccatgggtctcaggccgaacccgcagcaggggctgacaatgctgctgttgatcggtccgacgatccgctggcaccctctcggccattccccccagacacaaaggagcaggcttattgtcaatactgccagatgtacaaaccttggcggagccaccattgtcgagtttgtggaatctgcgtcttgggcatggagtaggtattaccgatcgcgatcgacgttcttgggtgactgatgcaactcgctttcagtcacgactgtccctgggtgggctgcatcggctggagaaatcacaaggtcagctgactcaaaagtgaaacagagatttcttcccttctgacaggctccttttccttgtgacagttcttcgtcaatttcctgacttggtcgactctttacacgatttatgtgttcacggtgttggtctccaagctgacacagggtggctctgctgatggtcagatgatcggcatcacagcagtgtaagatgtaacgagcttgaagccgaagcaaatctaagcgagctcacaatcgcctcgcagagctgggtttttcacattatttacggcctctatgctcctttcgcacatccaactcatctccatcggcatgaccacgatcgaatcgttctcgcttaggtcgcaactggaccgcgagcgggcattcctcaccagacaatttggcgtctgcggctggatgcataaacgtcgtgcgatgaaagattggggtcgagaatggggagatctgaagaatgaggggaaccgatggttcgtagggccaggcggatttgacgaatggaagagggtcatgggggatagtcccgttagctggattcgtaagcgtgatcgcaatcaaagctgtgtcaatctgcatatggctcagaccatcaccttcataatcatagtacctataggtcgctctcgtggcgatggtattcattttgaacagaatccacgctttgcctctgatggcacaagacggaagcgagaggattggccggccgacttgcggtgattgatagcttcgccttcaagacacgaaaataataataatatctatacgtcatagttgtcatagccgggtacagccagtcatgcttgatttctcagagcacactgcatggcgttctaaatactcttgcatcaagtagcacggtaatgacaagcagcatcccgcttgtgaatcgatcgcttaatctgcaaatgtcggcgttgccatgaaacagacgattgatggagcaaaagtgaataaccgatatcaagtttcgagtgtcgctcggactcacattcgcgagatcgctatacgcggtaaccgcgactggagactgggccttgttcatctcgatcacttgttcgtcacttgcatcactcgaaatcttggatgctttagccatcatagtttcacaacatcagctgaaggttatttgctttctgtcaagtctttcaaaccttgtgcccacccttgtccagacggatcatggcattcaatccgaactttccgcgtacaaacgcaggaaagcagaactttcttccccctcgcccgcagcattccttgcttcggccggcagatgtaactgccaatcccgattctcatcaaggaccaggacccgatcgctttgctcctcgccgtgggggctaccgagggggtcgcggaggaaaggctccgtcacgctcaggggttcaatcaggggttcaacagattgagccactcaagggttcctccatgtctaggaacttcaatcagatgtcaaatccaggacaatcggctgtgataccaggcgcaggtccttatagttttggcgatcgtccgggttccggttacgcatcagcgccgtcctctgttccttctggcataggctacagccacggtaagcatcgttattgctgggtaaattgggctcgacgagggttcgcgacaccgtgagagatcccatttcttgggatcccgcttgcagaggccttccttgatatcggtagacaactgcttgaacccctaagtgaaccagatagcgtcagaatggtattgaaacaaaggatcgggacaaggatcggaacggtgctgcgagtcgttcttcggcctggaatgcctcctatcctgcattgatagatctggaaatgagcacatgtgagggcgagaaaatctgaccggtttctgcttcgatctgctttctgcgtagcagatgttgcgaacgccacgatcccatacgcggatcacacagaacgccgcgaccctgatacccacaagaagttgatcggtgagcggatacagcgtgagcgaccttgtaggacccttttcatcaggaacgttagtgtaagtcggcgacgccgttcatgtcagatcgacagagaagagcttatgacaagaatcagtacgaagccaatacggccgaggttatgcggtcctttgaggcatttggggatattaaaggtcacttcgatttggttcggaatcgaggtatgctgttcgtaacctatgtgcgtacgatgcaaggcaaactcgacaagatgatggaacttacctgtcccttcctgtcagtacgactctcgtgctgctgaaagtgccaaggacgcaatgcactccacgtcggtcatgaaccgtccggtcagtcgcgtctgtatgtcactgagttggcagaatactcacgggatcacgggcctatatattctcttccagatcgatgtgcattatagcctccctcgcgccgatgagacgtctggaatttgcgatcgggaaaaaaaccaagggactcttctgatcaagctcgctaatgagagagaggcgaatccggtgcaggttcgcagaatgttttcgggcttcggcttaatcaaggacttgaggccaggaccagctcgagggtgagtggaggcagtgcttcaatgctggtacgctcaggttctgaggttatacaacagtacagcacgtgtggagttcttcgatagcagggttagcacagcgccggtggctgtcaatgtcgatacagatgattgatcgattatgttgagtaggctgctgttgctgcatacgatgctctgcagaacgaaccgcttgatggctcccggctacaattacaatttgactgggatcaaggggaagatgcaaagccatcgtaggtcacagatttagattatgtggaccaattctgaacccaagtcgcgtcgtacttcaatcctgggccccttcagcaataattccggagaacgacggtttagcggtggacatccagtcgtaaagccttcggagggaacatacacacgacgtaagtatttggttcagcttgtgatatgggtaacgttgacaggtcgtacctcagcaacgccgtacaccgatcgacctaagcctgctacagctatgagacctgatgaggtatggccacgccattcttccgctcaagactcatatgctaacctcttactgatcatcgtgcagtcggcggatcgattgcaggacgcacggaagatacaggatgtaagcttttgcgtgtcgccatcagcgagaccacgtctttgaccaatccgtcttcgcagttgcttgccggcctgggcaacctgctaccgccagcgactgggttggcgtctcgaacaaatacaacgaccactccgcacgcgcctgcgaccggcgccaccatctccggccaaactgcataccatggcaactcgttacctttctcaacaggcatatacgggcgaacgtctgatgcaatctacgctcgtcgccctgacgaattacctcctgtccacgctggaacccaagcaaccaggacattcaatgcccagacggatttccaacctttgccacaggctccttctggaaatccagcttcggtgatatctccgagcgtctttgcagctgtacaacaattcaatgcctctggcggtcctcggccacctcagtatgctccgccgccgccacctcctccagcaaccggaattatgcgtcagcccttccatcatccgaatgccccgtctccatacaatccacaagtagctccggcagctctgacatctagcaataacggtgatactacacaggcaatgactcaattgttggctttattggtccgttgttttccgggaatgacgtccccataaccgtctcggctctgactgacattctatcgagaacaggtagctcaacagcagaaatagggagacgtagcaggatcgcggttccttacttgatgactagatccgcactaccaggcatgatgtcataactatcataacgaacgcgtcaaacgatacatgaagaaatgctctatagatgaaatatgacacgacggttccaacttgaccacaatgtgtactgatcactgccccccagctattgtcgcagactactgaacgagctagctcggctcgacttgaattgcccgtgaccctgattactggcgttgtatttttcgttcagcatggtcgcggagctggaccgttgcagcgcttcttgcgcaagggacgggtattgggccgcgatatcgctgaacggagatcgggtcattttagtaatataatcttttctgcaacgctccgctgctcggaaactcacgcagcgtattgattcatcaattgagcggtactggcttcgtccagacggtactgcttcgggatgatacccttgcccaaacgataggtgacatggttcgaacagagcagagcgatgaccatgacggcgatttgcgcgggcaccaaggcgaaggcggccgtgtaccaggcctgcatagctcttcgttcaaacttcaagtacttagacttgcaacccggaaggatagaccgggggaagcaagtgttagatgcgaccgcttcgacaaagggagaatagtatccacagcaatgcagctgtaaggaaaggatcttgagcatcgcggaaaacttgtgagcgaccgttccatcatgcttaccgagttctgaattctgattcttccatccaggccgagatctcgactccattgagcgttgatcttgccctccaagttaaacgtcttcttcttgtaggtaatgtaaccgggtgcgacaatcagagcgaggcagaaccaaagaaagagcgagtagaaagccaaaaaggtccggttgttcaacagaatgcctgcaaagcccattatggcagtcaataggcacaaggcgcctgctgcggttgatactgtacagtcgcaagtaaggtgtcagccgagatgtagacgcagaaagctcgagctgggcgtcactcagacgtactgatgagttctgttctgtttcctacacgcaacacatcagagttgtcgaagatgtcgaaccaaacgagcaatgtaacgaccatgatggcgatcgagtaggcgaggaactgatttgaaagcatcgggcgggagaatcagtctgtgcaaccctactagactccccggacatatatcctcgacgcaccacgatgttggcgataaagatgacccatttgaaacggttccagaccagcttttttggctttccagtattatccttgacaggtcctgtagctctcctgccttcatccccgtcttcgtcttctcctcccattcgaccatgtccatccgcgttccaggcgttcatacctcctccccgcttggcgggacgcctgtgcgcatactgtcctggctggtgaaggctcgacatcttgctaggcacatagtgcgtcgaaagcacgcccgattttcggttggagggtttcgagtcgcgagagctcttggagacgaacgaacccgcaagcgattgggacgaatctctccttgatccaggtccgaaacctccgtctgagcctgagctgacgaatggaagatgagggggaggtaaagggtcgctcatgccgcggctgtcatatccctgctcctgtggttggaaagcgtacccgttcccgtcctggtagtttcgcgacggtctatcggtaagggatgacatgataccggcaggaccccttctgcgactgcgaggatcctgagtgctgtcctgagcttgatagccgtaggcagacgatgcgccttgagcccgctgagaatcaaatgattcacgtttgggcatgacgggctatgagcgtttgtgcgtctgggacgagttgagtgacgagatttcacgagctctccagtgatcggtcgagagggagaggcaacgagagtgagactgtgttgtgagtgtcgtttacgaaaaaatggtgaggtgactgattgatcaatcaagagatacaacggacggactgggctgtgtgatgggatgggatgggatgggatgggatgggatgtggattacgacaaccttttcggattccaaagggtaaggaggcgtaggaagaggggggaagagggaggggggggaaggtttcatcggacgttccaatcgtcctcccctgccaattcttggagcaaaatcccgttaccctcctgaacttccccctcgagaccatcgtgagcggccttggatttgagccaacggtacgtgattgagattcgcgtgctcctcaggatcctcgtggccgttctcggtctttccgcccgccccaatcgggcgtcctcgatcgacgatgacgattgtacctcgtcgtcgtagaccaggtcttccgccctgccttcgatcccgtgtgtccagttccagcgagcttgttcggagagtatatagaccgttccagccggcaaatagacgtcgtatcgtttcctcctggcattgccttcagacttgatattaccgcctccatctccctggtcatcctcatcatcgctactcccgccccataacccgccactgtcatcatcttgtttcaaatccacctcgtcgaaattcatcacgcagcctccacctagacaaactcccaagatcccatcggcgtacttgtccggtatatccacgtgcggggagatcccatgggtaggtgggtagaggttgacgatggattgtcgttgtcgtcgtcggggtcgtcgccgtggtgattcgtccgacaggttcggtggcgggtaaggggggtcgaataggaggtgcatgaggtattccgggatcttctcgcaaaggagagattgcacgaggttcagggtcgtacgtagaaactctgggtcgctggtgggactacgatgggccaattcccgctcgctggtgataagcgactccgtgtccgttgggaagctcttctttgctcctgcttgatcgacctcctcttgcccgattttcgcgggccgagggtccgagctgacagacctctccgaccgagagcccgacccggttctttcccagttgtctcgtcctggtccagctatcgaccccactcttctcttgcctgacgaacgagactcccatgcgagcgtcgcccgcgactcgtccgtaggacgttgcattccgaccttgcccctatcgtccccactaacaccatcgttgccatcaatgccatctgcacgcccacctccactcccacctcgccgtcgccgtcctcttcgatcccgaggatcagaagggaagtacatgacctggtccctcttcccgcccctgaaaacatctgcctgtgcgatctgcctgatcacgcgagctgttcgtgcgatggatcgatcgatgaatacgcaagatgtttggtttgatgttgtggggttttcgagttgccgggccgagccgagccatgatcgtgaccatcatcgccatcagataccatcgattcatcccgtaaatcgatcccatgataaccaggtaaaagaacccgtccgggaatgtgatcgtgtgggtgtccgagcccgcggtgatcgtcgtccggtccggcgacacgaagaaacaagaaaaaatgagaaggaatgaatccaaatgtatcacaaatcagttcacagttgaaagtctgatactgatgctcgacctcgacctcgacctcgacctcgatctcgatctcgatctcgatctcgatctcgtgtgcgttccggacacgctgttctctccagtgactgaccttgatcctctgcggggatgaggcgtgggaagacgtacagtccttgaatcggtggagtctctctgctcgccggctctaggtccatgggcgtgttcgtggtcattaagccttagaagcgttttgaggctatgaatcgcaggagatcaagcgggatgaatttgagctgggatgatagtagacctgcgagggttgtgctcaggcgatcgagtacatggatggtttcactcttgcgactccgagtgcatcatgatgtattgttctcggtcaaccccgagaaagatgaccggaagcttatttcttcgagatttacttccggatcacactttgagctggtacccggactagagggatgacggtatgggatcgtatgaacgccatcccgacaaccaccgtggaatttgagacttcttccacggctcgttatagtatacctgactcttccccaagaaatttgttatacactgacgctggaactcccggtctcatcgacctgcatctcgtgcctactcgacggtctgcgcttctagttgacaccttttcagctctccggaatgtggagactcccccgaagcgcgcgcgcgcttgaacctttacggctgtgacgtcatgacatttgcttccgtctgcctcccccctgtgccccaaccgccctgcctctcacgccctgacccgtttgccagcgttctcactcttgggaacctcggaaatcgaccttcgaccatgaccatgaccatgatcagcccatgcaactacctagtagctagcgacctacacatcccagtcatctcactagacctcaaacgttcacttccctgcaaactgacaacgacaaccttaccacaccctcacaccacaccctcacaccacacgcacacccaccgcacctcccgagatgacttcgatccctagcgccgaagagcaacagaaccagcaacctcatgtacccaaggccatcctctattcctggcaaacctcggtctgggtgagtcgctagttggctacttggctagtcggatgttggttcttgctttgtggtcggtgaggaggagatgaggagggtatcggggtgaagacacggcgaggaccgtggaagaggtcggttcgagcagataaagggacctacctacctacttcctcgaaccacctctttcctggcctttttttcgggtcgaggggagagatctcatcgacttgtcaccattgccgactacccgattgccgggcgtgttgatggtatggaataagacgtccggatgagaaatccagaggacggacgatgcggggttacagagaatacgacacgacacgatacgacacgagatgagatgaaatgcgaggacgagaaggctgacaaacgattctctccttattcttctccctcctcttcctgttcctattcctcctctgtcctttcattccctctttcttggcccataccatccggatcacacgcgttcctcatctgctcctatccgaccccattcaccctttaccctcctaccttcgtacaccttggcaactacgggcaacgggcatgcatctttcggtattccaccgcggtcgactgttgatggatgcgcgtacgcctgcttgcttgatcggtcgcctggtcggtcggtcggtctatttttccgacgacgacgacgacgacgacgacgacggacgacgaacgacgaacgactaatgtcgcatgacatatcgaacccggaacacggaacatgatcacaatcacgatccggtccggtcccatctgtaaatgaccgttcgggcgacgggatgacggacctcacgcctcacgattcacgacacacggtttacacctctactgtggccgtctactcggtggacatgcgggtcgggtcgtggtgtaactgtgctcggctggacgggacgattggttttttttggatactcggaaatcgatgatggcgtgtgtgcgatacttgttgacgacgacgacggcggcgttcctcctcgggggtggatgatctggtcttgatcgatcacgaacccgcctaacccgcctcgacacgaaccacgacgcgaaccccttcccccacacacatccgcttcacgcaatcaggccaccgtccccctcctctgtctgcacgaaaaggggtactcggccgacgagtacatcgtcaagcaggtcgacatcagtgagtcctttgacgtttgaatgcgctggttttcgtcgtctctgcacgtctcgtcgtcgtgattcagtggacgttggtatggggtcggaatggcctttgatggaattccgacgccgattgggaaggacgatgtgcacatcttacacccctggcagctcggaattcggtaccggagcatatcgggcgaaaagccggggatggacgaaatacgattgggtggacgcgcgggggttgagagcaacgtccgaggctcgttattccagttggcgggagggcgttctgcctaaaaatcgccagattgagatattcggatcgatgttggcgatggacgcgggctttgcggcaggagaacgaacttgatacgtactcctggacgctggggagtgggccgagaaatactccgataatgctgtgcgcggatggcatatgactgctctggccacaaaagaccactttgcgagtagacctcgtcggcttcgaatctctgtcagcgaatattttgttgcctttgctaacccatcgctcctcgatagccaagggtgaaaacttttctccttcctacttgaagtgagtatcacgctcctcatactgctcctccgccgaatgcggctgatctgagcggtttctttgttaccctcttctaggatcaacgccaatggtaagtaaatcggcccccgcatgacgcgattccgccgtgaacacgcgtgccgacgacgcacaacccgtcttgcttcccaggaaccattcccaccttggtcgtccctacgttggagaccactgggcccgaggtcaccaccaagtacaggtcgttgagggataccatggtaagccacgcggatcgcggatggcacgcctgcgctcgaccgcacggctgatcggggacacgctcctcactcgcagaccattgccgactttttggacggcgcgcgaaacgtcaacacgcacagcaccacctcgagcttgcctgctccttccttgcgaccggccactatcgactccaagacgctctcggactcgctaatctcgctcgttcacttgcccacggtcgaccccaactttttgttcctctcggcacgtacgccagaggaattggacgaaaagcgtaaaaaccccgccgggtccttcatccgagaccgtcaatctgccctcagacggtacattcaagaagccgagacgatcgctcaggaaaagtcgcaatccgccggacagggcgccgacgcgttcgagcaaaagacggttcagttcttgaaggaaaagtttgccgccaacatgttgctctcggacatttacgagggaaccgccggcgaggacactgaaaagggattctacgatgccggtaaaaaggcctggacaaagagcttgcccgacgtcttgaccgagttggagagcaggatcaagggagttcacgcgctcggtgatcacgtcgtgagtctagccgtttgggccgaccatggtgttctcgtaccctttggctcatcccgcttgacgttcttgatgtagtccctggccgatctccacatcatctcgttcctggcccgattagtcgagatctcggggggcaagggcgacgccgacggtatcgaaacgatcgaggctcagatcggaaccgggatcaagattggcgaaaaggttcgaactttctggacgacttggaccgctagggagagtttccagcaagtgtgagtcgacgggctccggcttggaatctcggcaaccaagatcctgatcacattcttcgcagcttcaactcgggctttacttgccacaccatctaggtcgtccccccatggaccgactgaccctgtccgcacgcatcgccttgacacgattgaccgaaatgacgattctggaaccaaattctcacatccgcgatcgacgctggatcgatccatctgttcgaaatgacgtcccgctctttgcgactcgtcattgtaattcgctacagtcccatttctcatgcacgtaattttggaatgatagttttactcggaccataaccacccataagcaacgggtggtgaggggggggattggtcggcccatcagtgtcgcaagcataggtcgacaaagtactgcattcgttcattctttcatcatactcttcactcgtgtatgctgcttgcctgatcatccgttctgaagcgatatacatcacaccttgtcgatttatcgtcccgagcttccccacaaaacgcctgtaaacagtacggcgaccccggctataccgcccgcgatcatcttgttggtccttgattgtcttgctttacctgcggttgatttgatgtcaatttttcagtctcagtcccgtggcgaggtctgagtgttcacgccggatttttgacgtgatacttccgtcactcacgctgtcttatgatctcgggaggatcctcgatcgtgacgtgtatccctctagccaagctgacggacaatgcctgccaagcatcgtcgacgagatacaactttggccctgaaaagccgaggtccatcttggggttgatgtagaatcgtatctgcttgtcgggaaccacctcgagcgagggaaacccctccttgacaattttcacggcggcctgtaagacaagacaagtgagaatgaagttcaagagaccggcgatgtatcccgcgacccacttgtcgagacgcagctaccggacccacgattctctgccaactctcctccctgggccactcgggttcgtagctgtacatggtcaaccgtggaccgtccggattggagggttgtgggatcgtaaacttggactcattgttggtgacagatgcggccaacggcgcctgcggcgcagggctttgagcgagttctcccggtgcgtccgtcttgtttgacgagggcggagtacgagacggctgcatatctttgtatgacgctgttacaaaaacaaggcttgccgttctctacgtgattacagatgtatgcatatcatcatcgaaactgacattcgagctgttgctgccagtacgccaacggttgatcagatctatcggacccggcgatctccgaaaaggtcacttcgaccttcctctcacactcaattgtgtcattttgtgcgaaagctctttcgccaatcaccttcgatcttccctgagctatctcagtttttgctgatcgtactgatgtactgaagccctcatttgatctcaagcggggacctcttcaagtatcggtcgagagggcctttgcggggcgcagttccagggccaggaaatctttgccaaattgattggtacaggcatggagaaactatactcgcctgaaaccatcactttgaagagggaagagttggctgtcagagactcagaagtcaaggtatgttcaatatggagacttttgggtggtttgcaatggtgacttgatctacaaataatatcagaggcggggagtagaaattgtatcaacttgtcaaactatcggtctggaagtcatcacaaagaagggtagcatataatgacgcatgattgtgcctatcgccttgttcaaacccttgaaagcctatcagatattcacaaagctcaacctatgctcggatctgtgaggtaaaaaacaccacggaaagacctcgatacagtcttgcgaatgagtaaaggcagacccgtccttgagcgtgcttgttttacaacggccacccgcttgagaacagcgctgatattcaacggatcgtgatctcgtcgatttggcctgaaacttccgatcgatgcatgcgtataggtaatgtagcatcgcaaccgcaactcacaagcatatccacatcgatgtctgtgctatcgagcatttcctctcgccacttgttacctcaggctgagcactcgaccaggctcaacggtggacctcgaccagtgttgaaagagcgctcgtcgttttgcccgaagcgaatcatgcattaaatcgacaacatgcgatacgaacaaaaacacgcccactactatctctgagggaagacgtcgataatgtgtgcgatgacgagaaccacgcgagatattggaggaagaataggaaggaaagcctaggatgcgagccggaccgtgatcccgatggaataggtaggtcgggtacggtcgggtcggggtagagagacggtggtataaggatcctggccggtaatcgagcggaacgtaagacgggacacaaaaaatagcaaaacagacactatatgccgacggggtgaaacgtcgtgatttacagctacgatttggaacccacaatatcagccacggcgggctttgtggtgacgagatgccgatgacccggactcaccaagctcaactcgagcgtccagaccctcctcgcccagactttcaagctgacggtctcttccgaaccttcatggaggggcacgtccacctgaacaccgtcccaccagcatttgcgctggaaaaagatccccccgtcgaaatcacaacagtcagtcgatcgtcccgtatcgtgtcgtatcacgtgtcaggcccgtgctcgagggactcaccgcgggtttcctccagaacaacaacaacttctgtgcggtactcatctgcgcctgatcgatcgtcaccctcgtgctcgcttgatcctcttgggcatcccccatacgttccttttcgcgcttgaggctatccgtctcgctcccttcatcgtcgtcgtcgctgctatcggaatcgtctgcgcccttgagggaagaccctatgaacgaggacgacgagttgttgttgttggggtcttccgggtgatggatgccggttttgaggaggacgagggcgatcgaggagatgacggtgcgtgtaggttcgagggatcgataaccccaatcatcgtccctcgcgaatccgctgtaacgaatggccatccccccgtgcgtatgtcagctgggtcacgaacaagtacgtcggggagaccgggtggggtcgaggacgtacgacatgcacaacatgtcgatcaaatgctgttccgccaaattgccctccttgctgacgttcctctgcagggccgtgaacactttcgtcctcttgaggagcgccttgcccgcctcccttttcaacctcaagagttccggggtaggttgtccatccagtttgactttggcctggttgacgagttgctcggggagactacccagcgtcaggggtttctcgcccttgtcggctagtcgggcgttcgggttgacgttcggatcggtggacgggacgatggaaaagtactctaattcttccctcaggacgataatcggttgtctggagaccaacgggttctctcctggtcccgctgggtaatccgaagggttcgcgtaggcgtgcgaggtcgagcccgaggaggtggggttgttgaggtgttgttgtttgtggaaatacccgggcgaggtggacgtcccgtaaaagtcggtgtgggctttggaccaaaaggagaggatgtagcggaacgatgccgggtcgaactgtcgacgtcggggttgagcatgcgaaaagagcgggtcgatagggagggtggtttcgtggtgatcaaagggagatgggaattccgtgcgaggccatgatgacatcagaccaacaagacgggtggaccaagtaacaagaagagacccaagctgttagtccccagaccatccaacaacgtcccaccctgcccacactccgactcacatcgatcggataaacctgattctccccatcgtcctcctcgtctggccatcccagctgctgtcgactgagtatcaacccgttcgggaacatgcccaacaagacgctctccgggaggttcagtagggtttccctctctacgacgaacctctcccctcgcatctctagggtcagacgggagaggagttgttgttgttgctgttgttgttgttggccgtacgaaggggggtagagggtatcggggaccgaggtgatcggggatgaagaaggagcgaccgaagtgatcgggttggaagaggctgcgacggccatcttgattgctcagctctcgattggttcttgtgcgaggtctggggggcgaggagagtgaggtcgattcgaggtcgactttgtcttgatggagcagcctcctttgcgtggtggtcgtctgggttgctgtgatgggaacgagtgatcagaccgagagtttagacgtgtcgtttcgatcggggtttttcagcctggcctggatgattgaatgacttgcctgactgaccgagtgagatctactttgtatagcttgtgatcgatctaggagtggattagagtggggatatggtcgatgtatagcatatcatcaacgagtttccccccttcttcccgttcgcaacaacgcgctcgcgaccgaggagaaccgtgactttagcacaaaattggaatcaacaacctattcaactacagctactacttgctatatccccgtcttagccatcttttcatcgccgtagtcctcattcagagtgtcactcgagctctctttcaactcgaaccatcgagtcgagccgaacaagaaccctccccgggatcgagctcatccacgacacgaacatcatacgacgctggaacgtacgtacgtagccctggcctggacacgaaaaacgctgggaaacgcgattcgatcgagaaggaatacctttcccggttggtcaaagaacaaaacaagaggacattgaagaggaactctgaactcgacctccggtttgcacgtcgtcgatcggcttgagaggacatttgcgacgacaaagacttgggatcatcaccgtattccagcgacggcaatatcggtagcaatcagggggacacctagctgcgatgggtcctacatcaagaggcagctcgtccggctcttcacaccacacgatcaaattgactcaaccttcaaaacccttttctcaacccaacgggcatcatccgagcaattccaccacgacctcgtcgtcgacgacgtcagcagcatcgacatcgtcgcaccctctcaccgactcgggcaaacgaccacgctcgacctcgacgctcgggctctcttccccccggatgacccgacttcgactccgcctccacgcactctccagttcgaccccactgcggcacctccggctgttcacatcttccagacgcgggcggatcatctccctctttctcctttgcctattcaccaccctcttcctcctcccgtccaccctcaacttttactccaaactccgactcccgacctctcccctcgacccgcaagcgtcggccgcgttttcgttgacgaaaccacgcctggatcaatcgggtaacgagatccccgatgagagcgaggggcaacaacaggtcgagattcagaggagtttcgaagagccggatttcagcctgttgagttcggcgcaaccacacgagattgggtgtgaggttcctatcatctgggatccttctgtgtcgaacgtcagcgatactgggtcgggtcggaggacgggtgattcgtccggatcagcttcaacaccagcgtcgtcgtccaacccgggcgtgctcgtcttcctaggcgtattctccgccgcacagtccggcgacaaatctccccaagaaatgcgtcgccggcgggacctctaccggacgacttatttcccacactttcctcccaacttggtcaccgcgaaattcatcctcgggttacctccccaggccgggatgcgaaatccggcagcggcgatcgctcgggcgaaagtgatgcggatgatagaggaggagagggatatgtacggagatatggtcatcctcgatgtgagtcttcgtggtgtctcctcgtcgagacaacggctggggatggcttgcgtattgcatcgtatcgaattccacgctcacgtccacctctacgcttcctttctgctttgctcgatcttggacatgctcagatggaggataatatcgattcgggcaagacgcatcggtatttccagtgggttgcgaaagagtacgcaggcgaggggcaggtgcgaggtcgaccgagattcgtcgtgtgagttcgagggcagaggtcgatccggtctgcttgatcacgcgctcaagcctacgtttttttgcacataggaaatcggacgatgatgtgagttgccgaggttttccgtttgtaatttgccgaaatagtttactaatccatgtaacaccgccttttttcgcagacgctgctcgtcatgcccaacctgatttcggcgtttcgggagttagactgctcgaccaacgtctactggggaacctcggccggtcgatcacagtactttggggattatttccgtggattggcgtatgccatgagttggcccttggtgagtcgagaagagacgttacaccgttcaagatcagaaccgtacgttcgaattcaatcgggtggctgaactggacatgccgctccccagatctcgtggatcgggcaggcggacatgccgatggcgcatatcaccaagatcgaggacgctcggacgggtcaatggttacgacatctcgaccccgtcgaggatccgatcacgcggatagattatgggtggacgatgggggattggaatcagctggatgtcggtttggagacggtagcattgcgtgagtcgaggttgagacgaggccagatatacaaaggaaggacgtgctaacctcaccgcatggcacatcgacagattggtgcaaatgggacgactgggtgaccgagcaaaacgacaggatacacaagatttggaaagacgccggtcggccgttcagatgggatcgagggatcgaagcgagcatctcggtggccaagggcaaggtcacgccggaagaagctcgacgggaacacgaccggcagattcaagccgggtgggacgtcgagggcaatctgaagggcgacgcggggcaagggtagcagcagatgtacgactcggcatagatcatgtgggggaacgagcgcttagaatgactcgggaaccttggaatgtaacgaccagtggcgatcacggcgataatatcatacgcatagggttccgcaacggcgtcttgtgcagcatcacctcgtggaacttgggacgcacagcagagagcactggcaaaatatattcggaccaggagaacttgttccggtgaccaacatgagggtatacgaactggcgaattgttgcgtgccagctgtatttgcaaggtccttcagtttgtgattggtcctgactgctgtagtcggccgatcaaacatcttaagggcgttgacatcaattccaccgatcgatcaacttgtatatgaaccacagacaggtcggcggagcgtaccttttgcagctgcgctctggaggatagaagcaggcatcggtccaagactgcaggaatgctcatcatgtatatacggaagaatatcggctacctgtgaacgaagaggagaatgcgaccggagaggacactgaatgcatggcagcagagtgtcggaatattcctactttcgaccgggagaaaggtatgtcgtaaaacactttcgctccttcgatccgatcccgatctcaacgataccatgtcgttctgtcgggttgcaatgtctctcctgtcgatggccagactttcgcgtgcagtgcatatcgatacatgttcatcaagcaaaaggcacctgtcaatgatacatcaagaaagcttaaactctgactcttttgcgtggactgccaggcgcagtaccagcgtcgctgtccatcgaaccaggcctcgcccgcttatgtcgaacatctggcgtggcacgaaccatttccaaccaggtaggggattctggtacggtgggggcaggtgccaatcccaacttctgcgtcaagtccagaccgctaggcgaggagaatgttgtatagtctgctggcgaagcagcgattcccgcaatcgcaccgggacgagcaggagtggccaaggccccaggtcggtacccttggaaaggcgtaacgcccgcgcgcaatgcagacgccttgggggtaggtgtcggcgctttggatacggacagaccggtcggcggagaggatagatccgatttggcgatgatcgctttatcgccatcgtctttccggccatagacaggcggctttccgcgcctgtatgggaggatatctgcagcgggttggagttcagccggcgtaatgggcgaatcctcgtggcgtttcgagaccgaactcgaggagtccttcgaggcggactgcagttcaggcaccgcaaactcatcgtccgaaggcggttgatcgacctcagacggaacggttcggctcgaacgcattggcagtttgcgcaggggagtagcgcttgtgaccggtctcttgcggggtccagatggccggctcggcgtctcgtccatagcagcagatctcgagtccaccttaggttcacgcgtttcgacatctcgatcggcctcaagattcagctgacgcggcgcggtaagcaccctgtcagactggaaagacgtagtgtcgtgaagtggaccggtattactaggttgagcgtgaccactaacatcatcattgagggccgtcttgcgaagtgtgggagcgggtgatgcggaaatggcgagcagtatttctgcagcttcattgttatccggtccagtatgatcttgtcgaggcttcttgctgttaacattggatcttgatttgctcaccggagcaagagtcttgaagaccggtggaggcatcagactgggagccattgtttttgatgtcgttggggtcattggttgcgcctgatccagcgtgtcagcaagcaaatccagcgatccaagagatggctgccccgatccaaacacatcggcttcgttggaacggagcagtaccggaggtggaactgcgcgtcggctctgtcctgagcgttgtaccgaggacttcgtcgtgtccttcgtgcgctgggtagaagaagtctggcgtacctggcccacgggagtctggtgggtcaggggtggcaccgcagggcgatcgatcgtctggcccaatggaatgatctcaggaaagtcagattggtagggttggtatcgctgctgcaactcgcgttgctcctgtgccgaaaggaaagctggatggacacgagacgaatcgggctgttcctcaggtggcgcttgcggttctaagttcgtcgggtcagtttgagatcgccgcgaggccgacttggatcttgacgagtcggcccgcatgacctgaggtgacggctctcctacaatatcggtctcctgaatcggtgcctcctcttcgccttcagcttcgccctcatcgctcgacccatcgccgggccaatctggttgagcgccagtcaggcgtacacgctccatggcagccaaacgagccgcttctttagtggtgatcctccgagttggttggggcgggatcgagacgtcacgtagacctgaaccgcttctcctcttgtttcgaccggcgggggctgggaacgcactcgcgtggggcgatcccgagcgactaggggtggctttagaggtagccgtgtcggtgatgctgtgggccacgcttccactctcggaccgcatgtcatattcgtcgtcgtcggatgattctggcatcggcaagccaagtttctcggctcgtcttcgtcgtctagagggagaaataccggctgttagccagacgagcagagtttacggtgatgaggttgggcttacctgtctttggcagcccatcgcctcttgctttccaaggtccgcctgtgtttttcctcctcatttgcggggcgattggggtctagacacggaggaaaatgtcaccaggttagaacctgtccgcagccatatgaccgatctgcggtggcacgtactattgtcccatcgactcttttttacctgaacctcgagctcgatcccatgcttgctcatctgatgtcttctgcagatacttcttgcgtgttgacccgtgtataccttgtcgcagtacggacagccatgtgcagtagggtaattcgggtcggtgaccgtatcacccggccgaagatcgggtctccaagccgtcggtctcgatgaaccgccatcagagtctctgtcctgggtatccttgttcgctgtcgacgaagtggtcgagacgggcttcttgcctttatcctttttgctcgaccctccttcttctttgcccttcttatccttgttcttgctcttgacctgtcttgccttgtcatctcccggaactcgcaatgtgtcccctatctccctcttccgctcagacgtccctgtcgcagctccggtggtccccatgcccgccaggatcctggcggtaaacgccgcactattactcgaatgtgaatgtatgctcattgcatcatcctcaaagtccgctgtgtctccttcagaacgccgaggacgagcatgccctgtactacgggaactcgtccgggagacagagtgtgatcgatcgggaactatgaatccacgtgaatccacctgtacatgttgttggggtggagccgggtagccgacctgataatactgtactgtctgggactgcagtggaagatgaggctgaggctgagactgggcatgaggatagccgaccgactgagctggtggacgtcccccaggatagccatattccggcgttccctgatgctcgtaatatccctgcctcgggtcgatccaatactgcggtcccaaagccgaagctgagcctgcatccgagcccgatagcggtgccatttgctggtcctgttggagctgttcttcatgctgaggtcgttgctcccgagattgagcctggatcggaggagggtacaagacatacccctgcccttcctgtaacacccgcggctgaggctgaaggggttggatgaatacctctggcccaggcgcgaccgtatagacggggtgagagtacccgtggcgtccagagacggatgacgggggcggtggaacgtaagcctgtccgagggatgaaccgtcttgcgagactgatctcgacctcgcactgccactccctatgctcccctcttcccccgcagaccctcttcgcacggacttgggtactcggaggcttgggtccaggtctccgtgtatttggctcaattccacagccgaggtggatctcgagaacgaccttccgggaccgctgatgctcttgctcgatgaggccgcagtggagaccgagttagatcgttgcgtgaagcgttctgggggagcgttttccaggttgtttgtaatgggcagggccatgttgggtctctgggtccgtttctgaggccgggtcttgattggagttgggggtatcagtgtgctggtgaactgtaatatgtgaagccacacagttcatagtcagcgaatcattcgaggcagatgtatcccattccacttccaagattcttcatcaggcactaaaccgctgaagctcgttaccactccgcgtcatgttcatcgtcgccgctagaatcactctccgaccagcctggacagcttctccctgaaccttccgccaatcccgttgatccgctcatcctaccgctcctagcatcacacaaacccacacgacactcacctccgatctcgagccgacactgccttcttgtacctgtaaaggcatatcttcgatcctcctttgtgtacccatttcgttcgattgctgacctggctgtgaaggtactgccaccgtattcgccgtgatggtcgtctttccacctcggggttgcgccgggaaacctgacgatggtctaccggtattcccgagagcagaaatcctagaagtggttttactcggtgcagggggttgtagagacccgctgtcgatcggacgggaagattcatcatttgaccggtgatcgaggttcgcagtcgaggtggtcccgttcgtcctcctagcagagaccctgccaggactgcccacggccttcttcttgctcgctggcatcctcagacgccaacgattcgtctagatatgtaaagggaagctggaagggctggaggtgatggtaacgtcgtcagggaaagcaagacggacaaggggaggagaggcggcagtctcgcgcgttcgatcgaagttctgatccccgtttatcctctcatcgatcgctgtctaggccctgtcctatgttgtttccttgttagctagtgtagaatagtcctcctgatagttgttttggcgtggatagctggtctgaagtgtcgatcggttgtgtagatctgtcgttgagaatggattgagatggtagttcgagtagatgatggatggatggttgagtgatgattctccctttccctcgtgacacagcgcacgcagccacggacgcgtttttgtgccggaattcttcgcacaacaggattcgatccccgtatactttgctttcgcaacaggagtctgcttagataacagctgagctgcctttgatgatggcaatgaggtctgtaccatagccatgcccagatcgactggtccctagaattctgtagaatctcacccaactcgctctccctttcacttacgtaactacgcgcttccccgaccgatcacgcgctttctcacggtaaacaccaacaggaccacgacgtcatcgatggatcggtggaagactccgttttttgtactggataggtgtattcacagcgagatcgctggtcatcctcagaggaaatcacctcttatcgaggcccccactgtggaggtagagggtgtgacggtttacacccatgtcagtgcgatctgagcgcattcgtaagcatctcccacagaaggagacagtacgacggatacgaagaggagaagaggtccaaagatacacgaagatgcgaaagcctaaaagagcaaaagagtcgcggaagcagacggtgagagggagggatactgaaaagagatggggcagcggatgttgcggaggtgtatcaactgcccactttcgggcacccgaaacatcaagatgagagcattatgtggcagcaggccatacttccagaaccgggccagtagacaccattcgtgtccccaggcgctcctctgctacaactgaaaagcaagaccgacattgcggctcgctactgtaaacttctcggtcgttagtaatcgatggcaaaccttaaattcgggtggcgcgatgggcgcgcggctcgcgagcagtccattgtaccggtctgatcctgccttcagggagaccaatctttgtctgataccgaatcatcttcgccagctgagactttcgataatgtgattaactagcaccttgtcatcggccggaagaggactgtagaccacgcgtaggaccgcttcgcgatcgtgaagatcctgtgtcacgagagagttcgacggctgccgaagtgaggttctggtaatgaaggatttaagctgagaactcctttcacgactgagagctgagatcgaaggccatcagaaagatcatcatatatctataagccatggtccaaattcagagaacagccattcgggcgttatcagtgcgatcttagcagcaactcatgtgaagttgatttccgcccgcatttcagaattggacagtaaagtagaagacaggggcagggattcaggaatgagccctaggcatctcatcaaagtcaggttcgggtcgatcgatgagatcattgcgcaatcgagttcggccgagatgatatccgaaaagcatagagacagcagttctgaatattcgactgataatgatcagagcaacggttccgcggtggaggaaagaaattgtgacgcaaggttcacaacttgtgatggaacgaactctacgagactcagcaacgaaagtgagacaaaggaaagcgtccacagttcttctgtaagtgaacacagtgacagacacaagaaaattctcatctcgctggctcgccgagcggtcgtcaagatatgtgaaggagaccgagaagatatattcttccttatattccgtggccaagaggtgggtagaggctagatatcgccccattggcaaccttgctgatcttgtggggcgactactcgcgctaatcttggaaagtgcttcaaaaagatctcgttggattgtgatggtcgaatcaaaggaaccgttcacagatactctgaatgcgacatcccgcttggacgcattgtcctgacggacgaggaaaaacacatattcgcagaatctgccgacggaaatcatagagaggagacacgtatcacggttccgccggactggcacctccacagaagtctcaaggtcgtactcgacgaggtccggttgttccaggctgtcctagtcgccgacttgcgtgtcgcgcttgtctcgagttaagaatcgctcgtgtacagcacaggggcgaaggagggaaatgtgtctagattatttttgagcgtaacgatgacgttcggtggtgcttaagacctggatttgacatcacaaaggattgttaaggaacagtccgaaacggcagattcggtgatctcgaaacctcgtgcagatttttgggcaatctgctgttgagaaccgactgatcgtaatgccaccgcatctaaatgaaatactgaatagccgtaacacacgaaatgctgacgttatgattggcgcctaattgcgtcagacatcacgccttgcacagatctgtatcacaagccagactacttgtcacgagagggctaccaagaatgtcgaaatgagacgaacctgatgacgtgcatcaaaggaatgatctagctgttcatacgccgaccgcaccgaaagaacattcgagcactacatatttatacacaccgtaacataagtccaaaccaatggatcacttacccgtccgattgagttggtatgcatgaacgtgtcctcttctcagaccgacaatactttttctgcgatagcgagcaattctgcaatggagaccgggcccagtgatagtggtaacagctcgacagcaaagccaagttttggtttgaggagatccacgaccagcacgcatcctgcgccgaacaatcactcaaattcgcccttcgacgcgtcttacaatcagtggtcttcggctgtctcaacgatgcagcccgattcgtcctcgaatgctctgacacacactgcgtcgaacttgtcgtctttgtgtgacaaggatttgggaagcgttccgtcgaccagttcgacggaagctcacggccgtcaccagacagcacatcccgtcaaggctttaggcaatttcatcttcaggctgctgcggcgattactgatagacaactcacggaacctattcatccaacctgtatgtatgctaagcggtggcaagacaaaacatggagaatagtctggctcatgtgcgaaccttgcagaatcctccgaatcatcactatcgttactgtctccatcctgatggaaggctgcagcaactttggtgaaacacagttccgaggagcatcttggcaccttgttgctagctacagaatggtacctagaactgtggtccttactggatatgaccgagcataagtctatagtgcgagatcagagcacacttactctgctagctaaaaaccctgtgctctgctgctggtcactgcacgcgatggcgcaaacagacggaacgatctggctcgttttcacgctcacggattatcttccctcagggtttcctggaaccccggcctactggccgtacttcgactctcctttcacctttgtttgggatcgattgtttacggaacatatccaggattgcttaggttatgccctatcggaaacaagctgcaatatctatgaagaggttacaggttcgcacacgcccgtaagtactatcacgagagacgtggtctccctcgctaacatagactatcccgcagtttggcctttcgaattggtgggaactttcttacgttcttgaagtagggctggagagaggcgcagcctctatcgaagtagggcaacgaggagctcaagcttcactttacacacttgctgtctggcccgttacacgacggatcagagaggttttgagtcaagctttcgtttgggaaggtcagtcacaagaggaattatcgatcaatttggcgcatgattacctccgtggcaaatctgtgagcgaaaccgcaacaatcgtcattaagagggtgtttgtgaagccctcgatgtctataaagattttgttcgaacgaaaatgaccggatccaaatcattttccacgcagcaaagctgtaaaatcatgcttctactcgtttgatctcgatataccagtcagtagtattcgttcagctggaccgagtcgacacatcattgtctgggacagagtttcaaactgattatgtcgccaaccaccaacaagccagaccgattcgaacgatctcgaacaccggctgccagcaatctaaagttcatctcggtcgaacctttaccgaaggagaaaggatgtgcctcacaaaatacctcgctggccaatcaacttgtgtcaggatgatgaagcgtctgtcacctggtccgctttcactcgtattgcttcccgtgtaagtctgcggcgagaataggccgtgaggcacatcgagagcataagaagcgattcggaagtctagtatgaggattcgcgcatctttatatatgtaaccatgaccaagcaattatttaagagataggtatagcgaatccgcgattctcgagattgtcttgagaatgagtcttcggagagtgagtgtcgttcgcgggacagtcgagcaccgttcgtcatctgctagcgatgtgaggtggaccatcgccgcgccaactcgcgatcgttcgataccctgcttcaagcggtcagctaagcgccggaagcgcggcagacttccattttgttccaccacaccatttcatcctcagccgatacgacatctgtattgcaattcgatggcgtgtttcactctattcggtgagaagctatatagctcaagcctatgcattgtggcattgataacgacccctgtaaattcgccaaacaatcaaatcgtctcacttattgtagagataatcgcgaccccttccacttgcggcacgtggccgacagtcagcccaagaatgagcttcttctccgataattcgcgtgacgatcaagcgacgaccgatgatgcttcgtttgcgccggaaagcgaccagacaagagcgagtttcccctcgttttcgtttcccacatcttggaataccactcaagctgcctgctctggtgatcaggccgtttccgacaattacgaaccctcattcgcgccggctgtagtgaacgtcattggcaccatctaccactatatctgcacggaagatgctttggcgttttttcaggtggtcagtcgacggagtgtggcatatattcttcctaatctgatccaccgaaatggaacaggacggccctggtggatatcatcgtatacgatgccaggcaattgatcgacacgaagcatgccggcggtctgggcaagtctgcgagaatgatcaagtagtccagactacccagctaccggctccttccgacaaacttttctcaaaccaattctccgacactaatcagtcaggcatatggcggtttcataccaaacagactcggtttttaccggaagtggaaaagcggccggtatagggtattcaattactctcagtggagaccacaaggtcccatggttaccccgatcaaaacgacattgtcatcactttcggttgcatgctgttggatggctctgccaagggaaagaacccactccgacagctaggaaggaagctattcggccgcaaggattactccaagcggcctgacgggagccgtcccaggattatggaaggattggtatcaagcctggcttcccagaacctcgattcaacttcagtaacctgcgagctttcggacacaggaagttcagaattgcccgctataccttccgaaaaattggccgggaactccgttaatcatctagctgagcttccgggtaagatacagtcggggacggccgaagattctcgtaatcaaattgaggagatgatatcgagtcgaggttcatagcacgcttatcagcaaaagactcttcctccattatacgatatatcggaaagcattgttgcaaagatcgtgctagctgaaaatgggagcgattttggtgacgctccatgcttcaatgctttatgccatgctcgccatgaagacccattcttccctgtaagttacggtaatctcatggaacgcttcgcagctatgctgattgcatttcgaggatggtctatatcatcaattacagaggagatctttcgccagcgatccgacacggtacagcttagctattggtattcatggcaacgtccgaggtcgttgttatcttgactgctcccgcaatgaggaagggttagactgggatctaccacccctatctccccccaatctgggacagatggcgggggtaaagccggagcgcagcttgaaactgacttacgacccacctgtgacctgggatctggagtgtgaaggatcttgtatctcaggcgccaacgtcaagaaggacagatcttcccggtttcaaaccctgaaaaggtttggcaaaggcaagagcgttggagacgaagcgaagatgcgcatacaggtcgtatggcttcttgcaagcccacaaggcactctttcgtacctttttggggcgggaatagcgtgaatgacagaattcagtgatcgtgcatgcctgtagactcttagaatcctacgcaagcgaccgattcccgagtctctccataatactggctctccgtgattcatcggtcttgactaaggcccgaagcttctttgagatacccatgtccgtcacgataccagtcagcattcagtgactcctgaaatacatctttgacctatattccaaggtaggtttaggttgcaaagtttagtgcgttcttgacagacacaggaacaggactagagacgcgcgattagctaccaacccgcgcatctgcagccgatagagcgaaatggcctgtctttgctgcttcagaggacatgcaaattttgccttcccgatccgaatggctgagggtgtttcgaagcatagtgtaaacagccgatcaatacgagcaatacttaaggcgaaggtgagttgcgtgccgagacacatatcgtcaagttcagagctcttgggcgcaatgcgaagctctcacacattggtggaagcgtgagaaagagggcaatcaactcctttgtgcaaccagacgactagactactatgcccggtattctatgccaactgtttctggacgaatgaaggcgcctgacatcgagtcgagcaggagatgaacgaacacagcttgcgcacaccgtctcaaacgactatattcgggcccttctcaagggattcccacggaatttgtgcttccagagagttccttgttactacgagctggacgacgggtccggagcccgtgctcacgtgagccgactgacgttctaccgcagacgtggtcaggccgtgatcgcatattgggtcttccgagatgtctccctgcctgacgatgtctcagtagttgcgaaccgagcttctcgcaatcaatgcggttggtcgcggtccaacacgtgaaacttggcagggaagacgttatcgacatggagtgcaacgggaattgtacttcgggttactggcctagccgactagctagcatatcacaggcatttcgggacgaaaagaagcagacatgtgcaacgctacgcgtcagagcgcgagcgatcacgaccgatcggcaagggagactctgtttccgatttgcggctagcgtagtagtgtcaccgtagtagatcggagatgacttgatttcctggttgatatgagagccatttcatcgatggtgtgaggatcagtatgcgctaccagctttaagcgactttgtcagggtgtttttggtgggatttacgataacacagttgagatttttcatcatgacgactgtaagaccgaaatggcgtgatagcttatttcgacccaatctgcagcttagtagccagagtcggtcggtgaaacagatgaatagaggaccccaattaacgctcctttcttcgagcgatatccaagaaccctgcagtgtcattctgtggcacaagtccatgctataagtaagaccgagaaaaattttacacccctcatgcaaacgtttctatcagtacattgctcatgtctcgaagtgacgcccagcaagcgatcttaccagctaaagaatcccatcaactgcatcttccgatggcttctaaatacgaaacatttaggctcaggtttaagaatcgtagaggcttgtctgctccgcgggcagaggatgctcggactgaaacggaccttactcaaccttccgcttcaggaactactccgttcgaagtgggagactcacagatttttgaactcgacgctccaatcacctcgttcgatactgagccttctgagctcggaaacacggaagtactcataagcttcgggcaaccgtcccatctaagccagccgatatccccgagtgagtccgtgttcatggctgggtccgccccatctatactgtattgcgattgctaacaacactgggactagatccactatgcgcacctactttgaccgatgcctctgggtttttcggagattcagaactgcattcgcagggctatatccatccaccatcaattcgtgtcacggctcatgaggagatagcactagcttcggtatccatcggatcgcttttcaaagtcatctgggattttgcaaagagaacaccgacttccccgtttcgaattctgtttgagccacttgtcagttgctcgataatatttccgagcagatcaagagactaaccttgcgtctagactgaaagtaccacgggcatggaccggatcttgcgagtcgacaggaaagatgggctgacgcaatactttcgctccaaggcggacaaccgggtgccccgatgtggcctcaccaatgttccctttggtatcttagaaggacaccatatcctcgccttgttcagagctgcaccgacggaaatgatttttgaggagaagatcgtttacacgatgaaccagtcagaggtagggcatataaacaggggtccatacatcgaattggtctctctgcagtgcggccaggatcactcgttcatcgatatacagttcatagtctgggatggagcggctcttgccacaaattgcttgcgcgagtactacatcgcgacatttcgactctgaaacagggacgtccgtagatctgacctgcaaacaagctaggctactcgtgcaatgtgcttggatctcccgtctcgcgagaaccggttgtactgctgatttctttccgaaccacgagcgcttagtatggacattattgactaagcgaccactgagagtaaaatacttttgattctgctcaatacgcattgttcttgggtcgcatcgagcttactatacaccctgcttgcaatcagtcagtctcggtcttggcatagcagatctaccagtagatccgaaaagcatccgtccggttattagcttcggtgatattagcatccggcgactggccgaaccggccgaccgggtaactgacgttcggacgctcgacctcgacctcatataacagcatgccctgtgcataacgacgatgcctagatctatcgaggctcgacgtcatcgattccgcattcacacagatcacactcttacattaccaaacaacctcactatgtccatgaacctcaacaacgaacccgattggagttggctcaagggccgaaccgtgctgatcaccggtgctgctaacggtctcggtcggggcatggctaggaaatgggccgagaacgggtgagcgcagacgtgaacttgctacacacacgatcgtattgaaattgagagtgctgcgtctcatatagagcttacgttgtcatcggagatatggatgagacggctgctaggatcgttctcgaggaactccgtaggatctctgggaaggaccagtaagtcttcccccctcccctcccggagggccagcatctcgcaattcgattcgctcgaagactgactctatctgatcggctcacaggcatcatttcgtgaagaccgacgtgacctcgtgggaatcccaggtggccctcttcaaggaggctatggaaaagtcaccgggaaagcacctcgacgtcgtcgtcgccaacgccgggatcggcgagtctgacgcggagatgttcctcccccaggctgacctcagtgagactggacctcgagatttctcacacggaaatcacgactgaccatgtatgacgtcctgcattgatagagctgagaaagcctaacgtcaagacgatcgatatcgatctgaccggagtcatttacactgcccatttggcctactgggcattcgctcagcctactccgaagtccggacccttgtcgtccgactcgcctcgtcaccattccctcctcctgatcggatccatggcttctctcaaatactcctctgagcccatgtacgccgctgccaagcacggcgtgctaggcctcttccgaaccctgcgtcgacctcattacttcctgaaattcgaccgcaacgagcctaaatccgcggggatcaagatcaaaccgggtcttttgtgtccatactttgtcgataccaacattatcaaaaaggacggcgtcaagtcgctgcccgatgatgtcgagttgaccaagatcgaagaggtcgtcgaggctgccagtcggatcgtactggacaaggaaggtgggaaggcgatgatggtgctcacgcatagcatggccaaggtcatgggcaaggggaagaacaagggtgggatcgtcgagattgggggtttgtccagtcaattgtaatcgagaaagaacggaaagaggaacgttcaagtagacaaggcgaaaagaatcactgtcgaataaccaattgctatcatttccattgttttgtactatctatcatcggcgaaagaagatgcgatgaacggacaggtgtcgttctgggaatcgccctagcatgtccgagcttattgatgagattcgaaatcgcgaaagcattgcatctcctggtgcgtgcgagccatcagtgcgtctgccgagagactctgaacagttcgctctgaagctgtaacctatgtgggatagcgaagtgatatctacgagcccgaccgtgtaaatggtatcggcacagtgtgtgacggacgcgtagtgattttgaggagaagcataagccgcgttgatgttgagatggctagagctggtcatgtgaaagcttactgcctgacttcgactgggtctaagctcagctcgagtcaaacaatgcggacagacaagggactcggagcgggccttgatcagcctgattgaagaagatcatagtaggcattgctgtgatgtctgagcgtatgaggcggtgacgacttcctgggtctgcacatattctggccctgccccgccaccagcacaatgatgggagaccaatcattcgagtccgagtggtcgaacttcgcatttgaaacaacaccctgtcatctccgccagtctgcttcgagctcaaactctacctcggtcgatcgctccaccccccagaaatcgatacggcatccagtccacgcggccagctcggcacgcggaagcatttctcggctctcggcatcttttcggaagtaaatcgtgacgtcgtcatcaaaggaattctcttatcttcatcgatcgaaatatgctaaagcgagacacaaaatgatcatgttcttgtcgtcgacatcgttgaaaccagcagccatcggtcacattacacacgttcctgctaacaggaccttctacaggtaggaggcttaccatggcttcaccatccacgccggtccggctcattcaggagcgaagcatcgatgcgagttcaaacacgaccttgggcacgaaactgacggccagtacgacgggggcgatcatgacggcgtcgctcagtaagtcaggaaagcgttgactgtttcaacaagcgtcgcaatgacacgagaggatgatcactgatactctcgtgtgcttcctgtagtgactccgttcgatgtcttgaagacgaggatgcagacggcatctcaacaatcatccgtcgcatccacctcaacccacaccccgaacccaaacatccggtccccgcatttccggcaatcaaatgcctggcactaccaacaccatgctcgagcggtgcaggatcatcctccgttcaccaatgcccatcgactcaccctcgcactccacccgaccgcggcgcagacccagggacacacaatgtacccatcctccatctcgctctacgccccgcgtgcgtcagctactgggatatcctttacaccctcttatttgaatatcaacggtggagccggatctgaagctgccaaacagacagtcttgaaagagatgaaacatatcgtctcggaatcgggtctccgtgggttatggaaaggcacggggacggccgtcatccaatccatcccgagcgcttcgatttacatgatcgggtacgactatctcgtcgtctttatcacgccattcatgagctccaaatcatcttcatcgtcaatcggaggagatgctggtgctgttggcggggacggatgggcggacaagggcgggatcccgttcaccgcggggtgcatggcgaggatggtcagtgcgacgatcatcagtccgttggaattattccggaccaggttgcaagctcgacctgcccgtgagtttagtgcccacgctttctgttttgtgcgaaacccaatggtcgtgctgataattgtccggttttgatgatcacggtagccggccagccagccccgacatacgcgaccaccctctcgacgatcctacaaaccgtatcccattctggtccatccactctctggcgcggtctcaccctgacgctactgcgagacgtgcccttctcgggtttatattggatgacattcgaggcgatcaagagacggatcattgccggtcgacctcttaccccggaccacctcatcggatcgagccagaccgtcgtcaatacggggttcaagcgagacgcttcgaaattgtcgctcggggagactttcgccgcaggagccggaagtgggatgttggccgcgctcatcacccaaccgttcgacgtcctcaaaacccgtaaacaggtcctcctcccgaccacccctgctagttcgaggggacccatcacccactcggcgttttcgacgattgggcacatgcgcacatcgtcatcttcccctgcggtaaatgttgcggggatgaatgttccgacgcatttgttgcacatcgtccggaccgaggggatcaaggcgctcttttcgggcgtgggacccaggacgctcaagatcgctccggcttgtgggatgatgttgggatgttacgaaggcgtaggcaggttgttcggggagaagagataaaggcccacgctcggatggcaaatgtgactgcggaattacgaatcacggcgtttagaattggattatggacggaatcaacatagaagataacactgtatcgaaattgtctaattactactgtatcaacgttatatttccggatcagcttgtctgccatgctacatgtccctccttgtggctgtcacggtagagacatttgcgaggctatgtataaaattcgacagctcgcaccggagagagtttcgaagtgatagggtaggagggggacactgaggtgctagtacatacaacatggttcgcgcttcaaaagtacaactagccaaacatagatagggaattgtccgaggggaccagtcagcttacgactggattcctcgccggttgacgacgaaaggagacgctagccgaccgttctcttcgtcggttgagctccatcagccgttgtggtcgtctgggtagaatcaccttcggtggtcgcggtatccgcgcctgaagtcgccgcctcggtctgcgtgggcattgcatcggtcactccggtattgctaccggtattttcctgggccggtgccacgagcgtggtggctggattcgtgttgacgagtgcggtacttgtcccggtgaccgtttcagaggcgagggctgagttatcagtctgagccgcagtggtgactgcaggtaccgtcgtgtccttcttgttgaggtaattcaggatgacgtcgcgtttcttggcccatactggatcgcctgtgcggacgatggcaagccaagtatcggcatatgtgggggttattcaagggcgactcccgcagctctccaaccctgatcgaaactgactcacctttcgggtacttgtatgggttgtataaattgttgctatactgctgcttgacggcttccaagattccatccgtgaaactaatgaaagtccaagtagacatcagtctcgaaaatccgtttccgagcagggatgagaacctacattccatactgattgggattaacaaaccgggcaccgacatcgtcacttgtctgtacccaagtggcattagtccacgtagtcgtatctgacgtgttgtcctgtcgcaagtcactgaacaagcgcatatgcgacataggcagcaggtaagcattggagtggactagccgaacaatctaggttgggctcacctgagcaacacaacaataccatcatgggccgggtctgaagacggtctaatcgttctgtatccgacggcttcatcagagtatgactctttggtcgctgcgttgtcgttgttggttccacaccaaggcgtgacagcagtagcactgctccaagagtttccggaaactgagctgtcattggtagccaaggaaaggttgtagcgtagatttatgttgtcgaagtagagagcaatctggcaaccccagcctggatcgcctttctttacttccgtcgccatccaagtcttgtcgaaaaaccagaaccagtcagcatcccctgcaccatcccatgtagcgatggatagtgcctgctcctcaatgtcctgggagtctagggtcgctgtctcgttgacccaacgggcccgttcgctttcctcgtcaactcctttataatgataagtctctacccgattgttttcaggaggtctcggaccagcggtctctgtaggaatgcgttgcaacgtgttggtgctcgtatccgagtttgtaacgctggccgtggtgccactggtcgcggacgcagtcaacgcgacaaagggctgagtattgctgatcacagttgtgtcctgctgagttgggttgggtccgttctggtcagtattgatggattctgttccggtacgggtcacagtcgtgtctgaatcggaggtactcgtggcagtagctgtagcggtcgtgtcagtcgcgccttgagtagttgcggagccggtagtaccggggatcgaccctgcggtatttgtcgtggtgctgttgtcattagcctccagtggtttcatgatgtccgccttggtccgttgccaattctgatgcgctgtagaaagtgcggattagagtactggtgaacaacggttacaagatgtccgactcacctttcccatatctgtaagggtttggtacatactgtttatgctcttgttgaaccttgcccatgatcgcagttaaccatctatgcacaggaaattcaatgtccgcattgtgaaacaacaaaaagagcgattcttgtcttacgtgcccgcttccaggcccatttgattagaggtcgagttgccggtccagaaagggttgaaatcggcggccgtagcccactcatactccgagcgctgatcgagaccgctgtcgaaagaggttggcagcgtcaagggattttgcaaaaccgccatcgacttgatctgtgatgcatcggtaaggcagtacactcacctcaaaagcacaacgaacaagtccgcgtccggctcggtggacggcttgattgtcttgaagcctaccatcattgagccagagtcgttataggggatgtctttcagagtgtcgttgcaccaaggagtcatatgtttaggcctgctccaaagattgctcgatgcgttggcggatctgtatagctccaggcgcttaggcacctcgtcgaacaaaagcgccacctgacagccgtagccaggtccccccttggccgcctccgacagagcgagttgggttttctcaaagaaccaataaaacaactggtcgttgacgccgtcccaaccggtaagcgagagtgcttgctctcgcaacaactccttgctgtaaccttcgggggtccaggatccgagctgttcatcgacgtactgttcgagtccacgttgataggcctcttggtggacattcaacacgctgggtgtagagacttcgtcacgctcgcgaataattcccgcgtgggcgacggtggcggagagcgccaacgtgaccagcacggtaaaggctcgagcagaaaatgcgttgttgaccatcgttcgtcttgtgcgatgcatctcggacaatcgttgatcacgacgatgcgaaacaacttacttagatcggcttcgctatttgtattcgcattcaagcaacatcgctagtctcctgctctccgctttgcccctagcatgtcaaaggaactcggcatgacgccaggaattgctcctgagcaggggaggggtcgtaaaggaagccaactatgtaataggagagagacacggagacatcagccgtcaagttgcaggaccgaaacaggaatcgtttgaccaaaacatcactgaaacatcagctctgtcgaacagcaaatcattatgaagattttgtcggggtgtttgggtcccacccgtaagcccgtcgtgtatgtcgaggacaccgatacaacgtgtaagaagaagcaagagaaatggtgcagataaagtgcaaaagatggtggcgagaattaacagtgatttgtaagcgtctatgaggagacaaggagatgcgaagcaaaggtccatcggccgtgcgcgccagttctatacgacctgaccgagcgaaggaggtggactctgatgaggagctgtcgcggacgtctgtcgagaaatagggagttgggtaccctgagctacctgaaacgtgtcattcgagcgaattcgatcgagctgcgagtttcgctggtcgttatacgctcgcaagctgatgggactctgctgaggagagcgcccttgctgggtcggggtcgtaggtcgttgatcctgcgcagaatcaacggggggaggggtttgtgctcgcaagttcgcatacgcatcttctgccactgtcgagggcgctgattcgacaggggtttcggtggaagggtattccgaaggagtcgcgttgctgtccgtcaacgaatctgtcttttggggcgacaaaactgagagcgtcggaaggggccccttgtcgtgcgcaggagagcggtttgtggggacggtcttggtgggtgttgcctgcttcgcgagagcgggggatccactaaagacctgtcgcatggcgttccaaaagcttcgctttggcttgagcgtccgagtggcgatggtggaagaggtgcgcggggttgttgcgggtcgcggcgatgaggactgctcctgtagggtgactggcgtcgtcactgcggcttgggtctgactcttaggagtcgcggttgcagggaccggtgcgggcaaatcgtctgcgctgatcgtggaccggcccaaaccagaagcacctcgagcctccggcgtcgcgctaccgtcaatgctcaggagaggctggggacccccagctggggtcgtagcaccgaccggggtcgagggtacagtagatggagtcgcagccagcgcctgggtcttgcccttgagcggtgtgaccggcatggacgaggttttgacctgatcgaccttggtcatcgagggggtcgtcgattttttcgcctttttctccgccttggcgcgttccttgtccagcttggcctgcagcttcttctgcctttcggcctctacgcgctgtttggccgcggaagccgctttttctttggcttcgcgatcggctcgagctttggcctccttgatctctttggccaactcctttttgctcttggtcggcgtaggcgtcgcgagaccagtgtcagaggacgctccaccgtgtacgtcctcaggcgagtcgaccaacggcctacccgtcatcgaatcttcgcgactgagagcacgggacaaagggctaggcgtcttttgcagctgattcgtactggaggtcatggtagtaggcataccctgagggtacgagctggggggatatgccacgctagggctcgtcgataatgaggttgtgctccccgtcggatgtacatcgatgacctgcggaggcaacgagagcgaggtcgaagaagtcgaattcgagtgaaagccgttgggcaacgaaggtcgggacgagttggccatgccgtcatcgtaagactacaaacgtaggtcgaccatcaatcagagctgccctttgtcttgaacagaacgaccctgaacttaccccggatccagaccagtccccgctatatcgcatcgatccaaagtcgccgacgctcccgctcaagccgttgatcgaagggggagcgttcatcgtggcggcgatagcatacccaccatcacgaccgagtccaccgagcctcatcgagtagtccctttgcatcgtctggatgtactgctgcctattggctgcagtcatggtcagcccgggcgggtgatgcgccggtcccagtgtcccggtagaggacgtgttgcttcgggaagacgacctcgacatggtctttcgcgaggcgatcggtgaggctggagtcgatttggccttgttactgtgcaacgtcccgccgttgagcgaagcgagcgagacgaccgagcgcgatttgacgggtctcgatagggtcgccgattccgatggcatcgagggccctggggggcgcgcatacgagtcagacacactgtcccagaagaagtgagcatatgcgtgactcacagatactgtcgtccatagggatcccgatcaagccaattcccccatcggtcttcttcctctggacccccgttcccgacgaagcggcggggacagcgcctctcccccgtctttttccaccgggaggggcgacgtaccctccatcgctcaacatgctcatcctcctgatcgtatccaacggtctctccccgctcggtgtcgtcggatttgacatatcgggtaccatcccctcgaacccgcccacctggcttgcctgtcggagatgtctcgtgtgttcgtgttcctgcgccgtcttgctcaacggggaagccatctgcggggcggctccgtacgccgaggatcgacgggaatgcatggccggtgccgtctgggtgggcgaggtcgacacgcgttcaaacgacttgagcgaggaagtgctactccgagggctatcgggaccggtctcactgctcgacccgggtccggcagcagtacctttcgcaaatgccgctgtcggaggtctcaaatcgatcggaccatcgaggtccgccgtgacgtcgggtgccgcatatgaactggccccgatcaacgtctccctagcccgtctctcttcctctttgacgaggacgctagtccgccgtttccaagccggtggggttacgacctgttcttgaggcgtgacggttccctcctcctcgacctcgttcgtcggggcgagagtcaaacccggtctttcttccaactgcgggaccccaccatcctgttccgacaaggtcctcatcaacccggcttccccttgctcatccacctcggcgcccttcccgctcttcttcctcctaagactgaaccctcttcccgtcgaggccttgcccttgcctgaaggactacgttgggaaccgacggaggatgtcgagcggtacctctgcaaagacgtttcgtatggattgtggtttgccgattgcggtgagacgggtggagatgatgcctaacgtatcgagtcgagcgacgtaaaagaacagagtcagttatcaggtcgtcctgtcgcgagtctcgaagacgacaaagtccctcgcgggaagagccgagggaaagacgattatgcgccgagagctctgactgacctcctcgaaaggctctagagcctgcaccccgaaaacgctcgtcgacatcctatcttgtcctgttcctgtaactgtttctcgtcctgagtctagcctgtggtatagttccttggtatcacgtatcacgtatcgttggcgttttgcttatcaggtcgatcgagtttgttcgccttgctgattatcgactacgtattgaaagttgtccgattcttgaatgaagagacaacagaggtatccgttctaattcacgtacgagcacgtttgacgagcgagtggactagtgtgtgtttcttaaacgtccgattggtagaccactactaatgactgatccgatcccgctcgacgttcgattcacacgggggtaacagacgtcgtagtgtatggatgatcgacggggttactccgagagtacgagagtatcgatgtagagtccgagagtggaataaccgaatgccagacgatgttgaacggttcggcctgctatacagatctggagataagagatggttgaaccttttccgagagagaacgcgagaagtcgatgacccttttgatgaggccgtcacttggggtcaggtgatgggaacgtgaaggggccgacgagatgatgacaatcagaccgtgctgaatcccggtcgatgttttagaacgatacggtcgttgcgaatgcgccctgacgttcgagttccggtttgctatcgatcgatgagatggggtccaacgttgttgatggtggtcgtttgctgtgtgatggtcaaagctgtgacgtcgagcgagaaatcaaacgaggtggtcgccaagtccatccatcatcatcacggcccatgttgatgcagcgatccacccctccctcgtttcgcttctcatcaaacaaccttcccccccgctcctcactctctccctcctctttccgccgtccgctgctgctgtggctgccgcccccgcccttgccgagcctcttacccttccgccgcgccacgaaacatcactttccatttccattgaaccagtgcctgtccctctcccctcctccgccgtctccgttggacgttggacctcggtctctttccttacgtacaatcccggttgaatgatgttctaccgtagaaaccccggcactgcgcgcgagagacaaaggacacttcccttcttggcaatttcatcgctttttctgctcacaaccccagatctcgatcaaaatgtcgacctcgctggacaacctaccctggtgacgcggcagcatcatcctggattaggtcatgagcgtatgccaatcgcaagcctgaaccccccagagccaagtcgcacgtcgacaatcaacttcctcattgattgccgacttccggatgtgaccagccagtaaccaaacgcggaacgactgcgagtcatgaatgctgaccatcccggcacgaaagcgcgaaaaaggcaaggtcgggtcaaagaaaagccatcaccgcttcgcctcgcctcgtttggaatcaaccacgtttttccagcaggctagccgtcgagtagcagcgaaacggtatctcctcaaagctcaaaatccaaacaattgtgacacagaatagcacacccgtaccgccgcccgttgtcggtatggtctcccagtacccaacagcatgccgctcaagccatctttccgtgccacttcccccctactgtctctcagattccgtatcgccctcggtcgctacacttcccgttccgtgcacacatctctgtcttcttgtcccagctttcatgcgcacagtgtcgcgtccactctgtcactgcaccccgcgttctcaaaggtcgattatgtacaaggcttcccttgccatcccttacccttccactagagcgtctggcacccatggtggaagaaacgtctgtgcccatgacgatggagaatgttcatctagctttcatcgacgaggcaacatgcgtgaatatgccgacccgtgcaacccagatgcgaaaccgatgatcatcttcgaggtctccatcgaggtcgacggcctgaagacgataccgatcaagccactcggagctagtgttcggggaatttgatacaagacccttcgcgtaaaaagtcatttgcacggtcgaggtaaggaaccgccggggcaagccacgagatggatagaatgacgaaacgtggtccagtccctgggaggttttattttcggtaaaacggcttcggttggcactcccgctgcgcctgtcatgacgattgcgttggcctagcaaaaggtacccgtagccagatgtaaccccttcagtacatcgatgatgttgcaggattcaggcttgcgaatgggccggcccgagggttgggtaccgaggtgtattgagctttacgagccggtcgctcggatgcgcgtgccgaagctgctatgatcactgcgcacggcttcgtcatattgacgttgtcggttcacgagcaataccgacttgtcgtctgtatccggatcgtcaatttgctggaagctccaatttatcgatgagagagaggtcgatcgaaaccaagcttctgtctgtacaaagctgtaaccacgaaaggagatctcgtatatccggtcgagaaacgagcggggttcatcgataaaagttcgaagtccactgcgacgtgcggtgtacagcgaggcgtgacacgccattttcatcaagatagatccccgaaatctcgaagtataacgggctgcgcggtcgaatcgcgcgtctcttcactgtgatgtgggcgcctctagaccagatcccctgacttggcattcaacaatgtggtgcccgcagcgagaagtattttctgctcatactgcgacattttttagcaagtcaccgaccagccgcaactactgcatcacgaggacttgagcattggtaatcatctcgaaccatgtggcctagactgagaaggccgttcgaggaagatccatgatgtagcccccgcacaaaattgacagtatggcgaccatctgctgcgtaaacgctgccctgcgctttgcagcccctgttaggaaccgacgagctcgttgcactgaaactccatggtgcctgccgttcgaccaagcttgaccattgtcgaccttgacttgcaaggatgcagggccttgattcaaatccctttcaggcgaaggaccgcaacttgcaaggtcaggttccatcgccgtcggatcgtctcatgaaatggttgcagcctgcttgctaaacacgaacgaaacgtcgatcggccaggctcagtccatgtatccgaggtctgtccgcacgacacaccaggctttgactcacagcttcgtatctgcctccatcaggggtcattttactccttcatcccgacccattttttggccgcatcgtacagtcctagatagatcccacccgcaaccatgaccgcacccgttcgtggtcccgtgcccttgaacagcgctcccaaaccctcgttcttgtacagctctacgatccgtggatagagcgaggtggattggagactctgaagcgggtctgagtgcgatttctatagagtcgaggggtcggcatcagcatctaccgacgttgccaagcagtgaccgatggaagaactttaccttggcttccagcatgatcctcgtcctcacgacgtctacgggctgggtaacgagactggctacaccacctccgatactccccgctaaggccgaatgcactgcggtcggctcgccgtctccgtttttgcttgggaatctctgagcgaggtccttcttgaaatgctcatacaacgggaattgagtgatagtaaacgggatctgcgaccgacaagttagagttagcctgcctgatcattggtaaccatttcagagtactgcgcttcataacgcgacttgcatctctagccaaagtaccgccatatcctctccagaaccctttgagaccttcgttacgccagaccatcctcaaacttttcctaagcgtcgtatcaggtccatacgcagcggtctgcgtgcgtgatttgatgatctcaagcgggaggcgaatcaccaccgagacctcaagatggagatcggacatcccaatcagcgggggattctgttattaggctagaactagaagaagggatgcttacgatctcggctcccattgacgaaaccaggtgattggccgacggagctgcttgtaggagctcgacatttttcggtaacgtcctcttcaaccactcgtacgtggtgaaaaacgcggccgctttccaggtcgattcgcgttgatgtcaaggtggaaatggaaaggcgtttggtgattctcgctcagcgcactctttcagcttaaagaccgccgagtttgtgtaactcacctccaggcccgctcccgacgatgacgctacccacccctttccagaccccaccaaagccgccgttctgccagaatccgcccttcgcttgtaacctgatcttgactgtatcgagggggtagaatatcaggtcggtcgacgtgcctgctatgagcgaagcctagagacgatcggaagagaggaaaagatgacggttgaacaccgagttcagcttccgcagctgaacgaccgagggagaagaacttgcggaaagagcttgagtgaatgttgtattccgttcgggactcttcccggcacctcgctgaacccgaatgccagagtcgttactgcccgtcatcgctgggcaaggcaggttacattcaatcgggcttaatagccaagatcttccagaccagcttgggtctgcttaatccttgttcgactggtccggataccgaaactagactgtcactcctgagattctgttgcgatgtatgactgtgcaggtcataatcaacaacaaagtcggaaatcccatctgctcgatctaccttcttgaacgctattatgaacgatcgtgattcctcatcggttcggaagctggtttacttccgtgatcgtccatcttcgatcgggatcatgaatacgggactggcaaacaggatctagcagaaggcgtgtagctgtagctctacgttatcatcgtatttgacaatatcttgaaaagataccacctcggctgaatatggctggaaggctattgtgacattgcgatgagcctaagcttacgttttattgatttacatgatgataatcggaagagcgggtttcagatcctggtcgactgaaagacggattggctggacggtcggacggtatcatctcgatgccaaaatccattccaatagattctgtgcagttttaagtgaagctgcgatcctcaacctatccgcttcaatccgaattcttaacggaacggcgggcatttagtccacgggttcgagctgaatccctaggcgaaatttgcgatttggactgtgactactctgtttcagtgcatgccgattgaagagggcacgatggcaatacatgcggcccaaattcttaaagagtgcaggaagtccccctccgaagtaggactcgtctttccactggctatcgtcgctgtaaattcggtcgagctggctagtacttgatccgaaaacgacaacacgtgcgacacactcaagatgatccgtttgatgtatggatcaagaatcaactccttgtgccacgatttccttcaggttcgccctcaaaaatgtgagaccagaagaatgaacaatgtcgtaacggatgactcctgatgtctcatctccggaatccatcatgattgaagcaatccttccgatggatatcgccataatagaagaggctctcgtatacgattccccacctttggcacgcggataacagcttcaaacgacatggcaacgacagtgcggcatgtcgtagacccggtcgatcatgcaagtggtaatgagggtgtcggaatatcaaacgtaagccattgtaccgtgtctggtctgaacccacttgttcgccaatatagacgtaacagtgctcataacgcatcgctgaaccggcaagcgttctattctcaacgggcgcacagctataaatggacgtgcttgttctgatcagatgacaggcgcaccgcgctcaggtcttagaacgctccgtctgcggtcgagcttaggaaaccagctgatagagcgggcgcaaacatctaatgcggcagaggtcgttatcgcatcggcagtggatatgtagatctcgcgggaaaagatagcttatcgctcttccagggtcgatagcaggaatcgatcgcggacaaagatagccttatcgggacctggcggttgccagagacgtgtgggcagtcagcgcggtcagcatgtcctgtgacttgttcgaccgaggtgtacattgggcgtgccatctgaattgacccgcttgatgaagcaccatcttctaatgtggagtgagactggcctagactggtctctagccgaatcatgcaacgagtcgctcgagatcgctttggattcggacccgggtacagcgatccggagccgagaaggaactagccgggcgcttcgagagcgatagccaggccacaggcaggcgggtttcgagcaggccgcgggtagtccccgggaagcatggcacccctgttcctagcacctgtgtccctgcgcgtgtttctcggaggctttatcgctctgtcgctggagtctcgattgcccaatctgcagacggggtatcgccaatatgaaagcgagccagataggcaaaggtacgttcctaattggatctcactagggacggtcatgctgtttagcacgccatacagctgactccgactctttgttggcctcaatcgagtgactggcctgactggcaagagctgtggattgatacgcaatttccagccgatcgatgacaatcgttgttcgatacgggcatagaaggttcaggcagtttactcccgagcggttacacgcccttataagcgagagatcgctctaagcgaggagtgatcgcgggatcgcggggctcacaaacggtgggtctcctgcaatttcaagtctcgaaatccagtagatagccaatgagaaaactggtttccgctttcagaaggagtgaactcacgctgtgaccgcatgggtcctctcatcccgtcggttcgcatgctaaaaacagctctcccctcctcgacacaccaaaccttggatgttcaatttcctccgcgcgggcgtggatgcttccgctcatgcggggattgctgcacagtgatcctgggtacagaagccgtgacctcccccggtctcacggatgcgcagataccgtgggatagctggcggctatgggatacgagctgttggacaactatataggtagagaagatagcccgtccgaaaccacatgtcctctcagatcagcgttgtacacacaaatcaatttcgcgactttgcgacaacatggactctaaagatatcaaggacgccaacgcgttcggcgacgttcacgtcggcaagccggagtacgcagattatggtgatggcgccgccgaggtcgaaacctattccggcgagactgttcaagctggtcacactgcgttgaaacgaggactcaagtcgcgtgagcaatgataatggaccatgttttagttttagccagagtcagctgaacgtatccttacgcgcgcttttaggacacatcgcgatgatctcgattggtggtgtcatcggaactgggttgttcgtacgtatcgggattacattagcttctcgcacaacaggacaataccctaactcgatgtttcgtttcccttctcccagttgggaactgccaacgcgctcaagaatggtggacctttgggtctcttgctcggttacgccgcaatgggtaggtttcgagtctcgtgacgcggaacaccggtggcgatatgcgcagcgctgaacaatggccttcgacctctttccaacgcaacaggtaccgtctgctactccgtcatgatttctctcggtgcaatgatctcgtacttgcctattcccggtggtcacattcgagtaggtctcgcgcgcaagtcggacattgccgatcgttcgctcacgcatcggacgcgccactattcatagcttgccgaccgttttgttgaccccgctttcggattcgctcttggatggaactagtgagtccggcgcttggcagagtctgaatcaactagcgagttggacgagaatacgttctcatcgccctcgcctctttttccctccgtagctggtacaactgggtaagtcgcgctccggccgacctttgataatgataaaaattctaggagtctaatcctttgccttgctcctccaaaaggtcatcattctcccagcagagttggccgctgtcgctgtgttgacttcgttctgggacaccactggcaaagtcaataatgctgtgtggatctccattgcgttcgccgtcgtcgcgctcattaactttttgggctctgggtatgtccccgatctgttcgcacgctacatggtgcgggacgctgacctgatttttgattgttccgcttgtttgtctctgtagcgtttatgtaagtggacttgaccggtcgacaactttacacgaggctttcatcggtgctgatctgctcaccgtgtcttgatagggcgaaaccgagttctggttctgcatcatcaaggttcttacgatcgtcgggctcatcatcctcggaatcatcctcaccgctggaggtgggcctgatggcgagaagatcgggttcaagttctggaaagaccctggaccattcgtccaatacatgggaattagcggaaccaagggacgattcctcggattctgggctgtcttgtcgtgagtggttttgctaagcgaaacctgatatattcggcatggcatgctgattttcccggtcacagtcaagccgccttctcctacattggaactgagattgttgctatcgctgctggagaagccaagaacccccgtcgtaacctgcccaaggccatcaagagggtctagtgagtcggatcgtcgcctagcatcgtttctcgtttggatggtccagctgattcatccgactgttccgcaatgcagcattcgtatcctggtcttctacatcgggggtgtcctcgtcatcggattgctcgtaccttccaaccagaagggattgggtcttggtacatccaccgcttccggatctccattcgtgattgctatcaagcgtagtggaatcaaggcgcttccctccatcatcaacgcctgtctcatcacttccgcctggtcggcggcttcgtccgatcttttcacctcgtcgcgagctctttacggtttggccttgaacggtcaggctcccaagatctttaccaaaaccaccaagaatggagtgccttggaccgccctcttgttcagcggatctttcggtgcccttgcctacatgagcttgcaatctaacgctggaaccgtcttcaactactttgcttccctcaccgccggtgcaggactcatcacgtggttgggtatctgcatcctctacatcaggttccagtgagtagacaggccgagtagatttaccgctgggccgagctgacgatcacctgctcgtatcactctcagcgctggtatgaaagctcagggtatcgacatgaggacccttccgtaccactcggtcctcaacaccaacgcctacgctgccaaatacgccgcgaccttcatcagccttatcctgatcttcttcgcctggaacgtctttaccaacactaagtcggacaagtttgctgctggtctcatcaccaactacatgccccaggctgtgttccctctgatctacttggcctacaagttcatcaagaagaccaagatcgttcgagtccaggacatggacttcttctccggtgtcgccgagatcgaggcggatgaggagccggagaaggaggagactagccgaggaaagcgaattctcggctggattttctaggctattcgagagtctaccggatggtacagattataacaaaatcacgtgcatgggtgtcttgcacaggcttgtgcagaagcgttgtatcataataggagaatgcgagtggttgcatatgcgaatgactagctcgactcagtggcagggatgagagaggctcaagcagattagatgcccaaggcatcggcagcgggcacagaatctacttgaatgaagattacaacatgcaccctgtatctatctgaaacgacggggtcgtgatcgtcaagcgacacgacacatacatcttcaacactgtcaacacggtcgctgccgccatagtaaaagaaggcaatgaatagatttggaacagagtcaattccatccacctgaccaattgctccaagccggttgttctgctcagcatcattggctgctgcttccgctccctatctctagagtgcggtgttgcctaagtgttatctcgcgcgtgtttcaagtggatcgagatccgtcaagcgcgtcgcgattctatttggctgctgcggatcacgatctaaccggtcgacaagctcgactgatcgactcggtttttcactcaggctcactgccttgtttgcaagtagtagatacccgaaagtcagcgactaagagcgcttgaacaaatcgtttaatcgatcgtatcgtcgccgtccctcaccttgtcacatacgggcatcgtgagcttacaacccccatttgacgtactcatagtgagaacgagttcccgtaacgtccaccccactcaacatggcggcgcctatgctgcagatgactccattcaatcagacccagcatgtttagaaggacaacaccgccccctctaaccaagccggcacggtttcaaaagaggtttttggacattcacaaggggttgcagatgaaagccaagagcctacgggtaacaggtctcttgcaaattcatccgccttctggcctcaaattttgaccaacctgaacaaagatgtttgggaggtcaagttttacagaggtcttgtaccgggtttcttttaaattcgatcatggcaacccacctactctgaggaattatctcaccttgggttatatccatccggagcatcacggcagcagctactctggagttctcgaaaacctcacaaatgaggactgtactgaaatcgtgattacgttcgagaaggaattaaacggcgacggcctgatttatatctacataacagagcaacagaccacatgcagcgcgctgcgagatattgaagttgagcttcggaatcagcttcactacatgactggtacttccccggcccccacttgatctcctgcgcacagcgacccaaactgcctgagcctcgtctgagacaaggccactcaccaggtcaattaataaccttacatccgctgttgatgtggtctagtacggtgttgctggagcgcaataaacttgtttgttaaaggtcgacaacgatccattgcgcgaacgtatccctcttcatcgttcgacgtcgttcgaataccgatcggctcggtcctgaggtgaggtcactccacgaaaaatagaatacagccatttgaagatgacctcactacagtagccccgtttcaacgatttttgctcctaacacagaagtgtgaggcgtatgctttggattcgggccggaatattccgcgacactgaacatgagtgtccctgtcccgagagacgatctaggattttcgctcctcaacaacaccggttcatctgaccgacaggtcggataaccgttggaagatgacccatctctaggccctcgatggtgatccatttatgctacagcgcttggcccaagcgagcaaatgcacctgctggaaagttggcaagggttcctatgtcttcgcgactgtgacgttcatatgattgcatggacataagggccccaaccaacttcgaaccacgtatcacccgagtctatagaacattctcatgctgagaattgtctccttatataggccgaagacagcgtctgcaagtccgtacctgacccagattatcagcctcgactcgaactgcgccctttacaagtcgtgcgtttcgcactggaatgattcgagaaagacatttggctgataagagcatatgcgcacgaaagcgatggtcggcgagacctggccgagttcgtagactaaggaccagcagtatttctacggccgtatgagatgtctaagcgatagtcgacatgattgggaggcaagccaatcctcgagctgaaagggcaagcggcgtctcacatgcagtcccttcgttacgacgaggcgcgaccctcgcaggcagacgatggaacaactgagtctgcgacgtggttatactgccctgcaacgatttttcattaccatctgctgacgataccttgtcgtacgattacttgcgtctaagcgatggtcatgatacgatgcgataacaacgggatggatggtacgagttcgacccattgcttgatccactagggttcacctcgagtctgtgctctcccccctttccctgggtcgatacggccgagaacgacgtacgaggttcgaccgagaagagcgattaccaaccaggataggccggggggaacgccatggcaacattgaagctaacatagaagtcacactctactactagctgcaacagcaaatctattatattgattcaagtataccaggactcgattcgctgcgagattcgttctacgaccactcgaacacctctcggccaaccgcgaactcgctatagccggagcactcgagaccaagatctttcctgaacatggccgtccaacttcccgttgccaggggcatctctgtggacactactggggccgagatcattgcggaagattccccagccgtgagtaccgcgttcgtgctacatgcaacgttgcttgcgagctgatagtcgacgtcctactcgtttggtagacgcgtgatgctagagggatctacctcccggcttatcgagaactgctttcgcatatcgccattgatgtgagtcgaactttgagctcttcatcttcatcgttctatagctgagcgaacgtgttcgtctgtccaatctagatcgggggttctctcgccaaggtgaatctctcaattcgtcatacatgacccgaatcctctgctgaactcgtgcatcttgccagatcgtctactacagccgttcgcctaaccctccgggccggtcgacatcttcctcgaccccggtcgcatcatcctcctcggcctcttcctcccgacaacacacattcaccgagctcgatggcgacaacgcctggacacccaaggtgaacggagctctgacacccgacgtcctcagtacccaacataaagactctgagctcgctggatccggttcgaatcgtcacccccacgtacaagataccgtggggagctccaagaagtcgactacggcgcctatcaagcgtggacacgctcggcatcattctctcctccgtcgaggctccctcccgccgaatttccccggggggaccctgaactttgtcaggtttgagacggaacagatccacgagctcattgcctttctcaacgatctgatcaagcaatccgctgcgaccaatcatgtgaccgaggatgaaatgaaaaagggcgtccgggtgatcgctacgggtggaggcgcgcacaagtactacgacttgctcgtcgaggggacggggttgagcgtgcacagggaggaagagatggaatgtctgaccacagggttagggttcatcacgtcgatcccagacgaggttttctggtactcggacgagctggtttacgagatctctcaccggggcaaagaagaacccgtcccgtcctcttcaaccacgacgagtaaccctgacctcgcacccgaacccgagcgtaaaaacctacctcgaccatccccggacccgccttcctaccaagtaacgttcgattcttcgggtagcccgcaattcccctgtctgctggtcaacatcggatcgggcgtgtcgatcgtcaaggtggacgaggacgggagtttcgagcgggtcagcgggacgagtttgggtggagggacgttgtggggattgttgagcctgatcaccgaggcgacgacgttcgacggtgagtcttcaacatgtctcctttgaacctgcatagtctacaagccgctgacaaccatatcgcatcgccccgtcggtagaaatgctggccctctcagaaaagggagacaatgccgccgtcgacatgctcgtcggtgacatttacggctcggattacaacaagatcggtctcaaatccagtacgatcgcttcctctttcggcaaggtcttcaagaagggcgcggcggataggaaaaaggcctttagtcaggaggatatcagcaagagcttgttgtacgccatcagcaataacattgggcagatcgcgtgagtatccggccgcattctcaagcgtgagaactttactgactcgatccttgccttatcatacctacagctacatgaacgccgaaaagtatggactggaccggatctactttggaggttgctttattcgcgggcatgcggcgaccatctcgtgcttgtcgtacgccatccggttttggagcaagggcaccgtccgagccatgttcctgcggcacgaagggttcctgggatcgatcggcgcatggatacgaaacgtagaagcaagcgaaggaggtaagaatgggcaggatggagaggaggctggtatggcgcaggattaagcgggatgattaggtgtggtttgggttgtatcgatattgggtcccgatcatacgatgccaaattacgcgatcaaatttggcgaggcggatgcgtctcctacggcattgtgtccttcctcgtgaggctattgcctgcacatcgaaggagaattgcatttgtagcaatgaggaaggatccgaggtggtcgcggttcttggttttccaattttatgatcggaaggccgagattctcgtccccctctatgctattatatgagctagctagcctcgcggaaagcagaacagacagctctcttgatgttctggcatttggtctaagactctggccgaggcacgcgagcatattgggattgggaaatcacgcgcttgtgacgtgactggcggaagcgcgatcgacgtgacctggcgtttcaagcaaccgggaaagcgagcgtctgatcggcggatgggtttgggctctgcaaggtagaaaagtcacaacatgacaacatagacacgaccttactgatgtaccacgagtgctatccatcgatgcggctggatcgtagaagcgatgtctggaccggaccgagatagctgcgacgatgcgcgacatttctccaatcaaaaaagctgacttgcgacgagagattgtgtagtctccagactgtgaaagtcgccctccgatcggaaaaactcgcgaaaaaagcgacggatctttgacccagaagcgtcaagaagtgacagttgagcgagctgcgtatgtcagggtctttgatcgtatcaatgctcgccgagcgcgactcgattgagcgcgatcttcacaaatctcatcaatcaatcaatctttcgcccatcgctgatcgtaatactgatgatcagtcgtagtttccttgtaatttgatcaaacgatgatcaaatcatcttttcaggtggaaataatcaaaaacagttcaagcggtgaaccgtttggacagaaggttactaacgatgtcaacgtcgaccagcttcatctgtatatcgaccggtcattgagaacggctacatggtcatcaccgctttcaggtatcaaaactctcacacctacagtaccgcttcaacgtctttgaatccctctctagtgagtcttgccatgtgacgaacccgcaagtcagcggctgaccgcgtatatcttcgcaggacgacgaaatgagcgtctctgccgtccttcactcattttcgacttccagaatcacttccaagtccggagagggtcaaagtggtcagatccaaggtgattaggctgtcgaccgtattatttcccagcgcggtgcagatgcgataacagacgacgctcttccatcgacgttcagtcgcacccgtcggatccctccaaaagcttcacgttaagcttcacgatcatcttaacggtggacccagttacgaaccaatgagcccgtctttcggaaccagcaatccgactatcaaccccgagagtcctcccttgagtcccagcgtttcagtgcaatcccatccggaattcggttactctcctgcgagtcccgattacgggaacggctcgaccttaccttttcgccctgggactccattcaaccgcggaagtgaccagcccccgaccgttgcaaagcatgattgcgcggaaggcctttcgtgcgacacggctctcggtcttgccaaagcggatgctaaggatggcagggctttcagtgaccaagacctcgactacctcaggttcaagggggatcaagcgacgtccaacttgctcgtccagtacagacacgagcaagacatgaaggcgatgcgattcgctcacgagcaaaacatcaaggccgagcggttcgcgcacgaggagagaatgaacgttatcgagttggaacatcgaaggagactcgttttggacgcgcagatccatgagctcgccgtcatggcgcaaaagtgcaagatgaggaagcgaggagacgagacgcaagactgagagacatcaggtaggccttctatcgagacgatcacgactctgaggctttgctcatctctgactgttctgtcattatcattctccgttacagagcgaccatcgccgatcttagagtacatcgtctagcaaggcatccgtcgcctgatcttccagtaccgacccctctatcggagttcccgttcctgtcgtgggctcggtctcggtcgccttaacctttctctttctctttgccttgggcttttcaccgtctgccgcttcggctgtgacacctgtatcggagcgtccccatgtttttgtcagcgagctgtctttatacgcatgatatcgtctaagcgcggtctcgctcaccttcaccgccttcctcgacgtcggcctttttcttcctgacacgttttggtttgacctctccgccctcctcgtcagcggcaccggtcgcggtgctcttccgtttcttggtcttggctggcttgtcaccagccgtatcatcggcaacgggctgcttcttgacggcgctaccaaagaagttgtcgtcgtcttgatcaccgccaccaaatagtggattgccaacatcggttgccatgccgtgagcccgagagaagccaccagcgagagcgcccgtgtcctgcaacgaacgtggtcagcttcgtgtcgaatgcctgtgcgaccttccaagccactcacgtcttcatcatcaagcaacattgacacaatttccttgccgctgttgacctcggcaacgctcttgtttccgacgacgatgtcttgcacgtcctttttgtttctcgccaagtgcagcatgcgctcctcgaccgtgcccttacagatcaaacggtacaccgtgacctgtcgcgtttgacccacacgatgagctcggtccatagcttgcgaatcgttggagggattccaatcgtgttcgtctaaccagaggcaagtcttagtcacgaacgggcgaccacgccgttgagctttgagactcacaaaagaccacggtatcggcggcagtcaagttgataccgagacctcctgctcgtgtactgagcatgaacacgaagatgtcggggctaacgagacggcctgtcagctcgtgcacatctaatgcgggaaaatgaaacgtctgtcgactcacttggtctgccaggcgttgaccatgtctcgcctctcgcctaactgagtggagccatccaacctcacataacgatgttgacgatacgacaggaattcttcgaaaaggtccatcatcttcgtcatctggaaataaaccagcacacgatgtccgccctccttgagctcgcggagcagtagatccatgcgtaacaatttggccgagtcgaccatcaagcgcttggcgttggggaaagccattgacgggagcggcagttgctggactggcgatttaccgatcagacccaagggcggtaggtttggcacggtctgccgtacccggtccagcaagacctcgtcatctgccagaggcccgggaagcccgtacaagatgagccggtcagtctcgctcaaccgctgctgctcctggtcgacgataaaggaccggctggcgcaggtcgcatggataggaggagccactgcatcgtcgacgacgaagcgcgcttccttgcgcgtcaggaacgattcagtatggatgacgtcgatcacgggtcgagccgcatgctgcgtgtcgattttgaagagccgatagtaacctggcaatgcgtgttcctccggcccctcaaagagatcttttcgatcgtatcgccacccggcggtagggagcggggcgttcacgggggaccaaatattgaaaaggttgttcaggtacttggtgtcgaatcctgccgaggatttctcgcccggtctagacaatatcccgccgtcttcccagaccaatttcggcagcctgaactcaatcgggtttcggcagctgtcagggcagtagagctccttttgacgaatcaactcgccgctcccgctaaacgtgccgaaagacagcggagatactacgtctggtcgctggaagagatccgggtgattgcaaacttttcgaaattgcatgacaatgttgagcaagacgttggtcttggcggccgaatctgatcctgcgctcgcctgcgcgaggaacgccttgatcgaagcgtcggaccggagcatcctgtacatagccttttgccgcgagctcaagtcgaccaagatgtccttttcgatcttgtctcccagctcgctctgcacattcttcttgattcgtcgcagcatgaacggccgtagtacgtcgtgcaatcgacgaagctgttgggtgccgagtgtagagtcgccctgaccagcgaccccttcgatacccttggagaaccactcggtgaaatccgtcaacgaggtgaagaggtcgggcatgataaagtgcaacaatgcccaaagttctgcgcaaagagttgggacatgagttcaaacctcgtcagaactacgtaataacgttcgacccacctgtcatcgagttctgaatcggtgtacccgtcaagagcaatcgattcctcgttttcagcgacagcagcgtggtccaacggagacttgtactgttcttgaccgcttgcgcttcgtccagaatcatgtactgccagcgaaccttgtggaagtaggcgtgatcttgaaccgccatgtcgtagctggtgactacgaggtggaagggcgcatcttcggtgtagacgatggatttacggttccaatcacgtcgcaagacctgacggtccgatggtttcccccaatacggaatcgccttgagcttgggaacgaaccgggtcaattcttgttgccaattgtgaactgtcgacgtcggagctacgacaaggaagggaccccagatgttttgcgtctcggcgagccaggccagcaaggaaatcgattggatcgtctgtggtgcgcaagctaggtcagcacgtgcgtttcccatatacgacgctcgcgtcacacttgcctttccaagacccatttcgtctgcaaggataccgttgataccgttctcgtacagatgcgccagccatgagagacccttgacctggtactctttgagttgcgcctgcagcattctgggctgagtgacggtacttcgaactcccgctcccagtgggttttgaaagtcgagcgattcagacgtgactatataagatagggcgtcagttgaagaatggcaagcacaagctgccccgtagacatacgttgctcatcgacattgcctttggcagccatggcggcctgtcgctcggcttgtacctgctgatcgaaagcggccgcctcgcgtcgctttttgcccatgatggcacgggctcgagcagcagcgcgctgtttggcgacttcatcggacacgtccggatcatggtctgtcaagtcgtcgtgggtcaggttcatctcgggtagaccgttttggagacgatctgcttaccgtcctcgttgatttcaatgtctgcctcgtcaaagtcgtcgtccatatccatgtcctcgtctggatcgggacccgtagtgtttgggtccacggccgtatcattgctatccatagcgtcatcggctgcaaagaagcacgaggtcaggaggtttgtgacgagaggtcttttagtgcagggacctactcttgatcttcttgagcatcagcttgctgtacgtctctccgctgtccaacaagaactgtagacgcttcgcggctcgagccttttctcgagcggcctcgtctgcctttgccttttcgatggcttctcgttcggctcgtttgcgctgctcgatctcgtccttttcattctttttccagtatgcagcggcctgacgaaggggagcaagacggcgtcggtcgagatatcgtagaatccccagaaccgatgctactcacgtctcgagcggcctttcttgcccgggcctgaacttccttgggagtcgagtagggacgctggacccaccgcttttgttgacgtaccgcgataccgcagaccttgcgcgcgttctcaatcttggtcgccaacgaggtgtcgatgtgtttggagacctggggcatggcgcgataagcgggtgaaggatggcaggggatggcgtcgtactcaccggtggaatttgattggtcacaatgtctttccaaatcgaggctctcatcagttcggctttcaggtaacgagctcgggcgacgcgctcggtgatggccacatcgggttcatcatattgcaagaattcggataatgggatgacgaccgggagttcctcttcaggttccggctccggctccggttctggctcgggctcgggttcctgttcgggttcgagtgctccttccggctcgtcatcgatcaacatctcgtcatcgtcgtgcgaggtcggtatcggatcgacgtcttcgtctcccgagaaggggtcttgaccgtatacacgctcttcggttcgcggttcagggacctagtacgacgaaacggagaggggtcagacggttggtgaagaatacgactcgggaccctcgactgaccgtatcaaacagacccacatcccgtgccttgcgcttgcccttggagggcttggtcccgccaagcatatcctcgaggtcgtgatcgagttcggcagcgaattggctatcggcctcgctcgccagatcagctgcgggtgagctcgctcggctaacgggttgcgagacgatcggcttcttggtccgtttgcccttctttttgggtggcgtctcgacggctggtaggggcatgggagtaccgtcttcgctgacgggatcgtcgtgaacgctatcttcaggttcacccagcccactcgcgttgaggagggcttgctgacgaatgtcaccgccgtcgccgccgttgaggccggcctcggatttccgcgtcgatgcctttttcaccttggggatacctttcggtggaccgggttttcgacgcagactaccgtccttgttgacgagccccttggtcggccagctctcgcgttcccatcgctgcttggtctcgggcgacatttccttgttttggtccttgtttcggcgtcgactctttttgggtccatcggccgagtcgtcctcgttgtcgagtccgtccatatcctcttgttcatcgccggcatcgccgggaataaggtgcatcaggtcatcgtcgagatcggcgtcctcgtcaccagtgtatcccaattcgcgatgttcaagcaaaggagcgggttgcgtattgttcttgggcctgccccggatcctgatcttttgctttttggcaaggacgggctgttcgttcagcgtggcatcctggtcgaccgacgcggcataagacggcattgacaacgatggtggtgccggcaggacggtcggttcaggcaaggggctcatcgacccgtaccgatcggggtggctaggcggtcccgacaaggtccggtagtcttcccctggctccgacatgattgatcctagtcggatcggatgatcgtgcaccgacccggtacgggactggggtcgggacaaggcgatccctgcgggcagatgattggagattgcgccgtacgagtcgccccggatcaacctgggcaagtcttcctctgtccgtcgaattggctccaccgacccgttgctagcggggacgacctctttcgactctcgacctggctctgcgctgatgctgctcctgcccctctcccgcttgtacccataaaaagtcctctccccgccgccgttcgataggggtgtacccgggccagccctgcgtcgagcttcccacttgaccaactcgttgagccgcgcccgtttcgccttgatgatctcttccctttcgagcatgaccgggtggtccctcggggcgtatgcatgaccgttgggcggggcgtgagccctgtattctctatcccgatcgtattctgcgttcgaggtggaatgtgcggcagtgatggtcggtggcaaaggtcgtccggccgttcgacccgtgggcatgggtccgaacacggagtcactctccctccttgctctgtcccggtcgtaatcgtagtcgcgatgacccctgatcgagctagccccggcgttggtcggtggcgagacccgttcgtccgcatagtaccgcccgccacgcagggaaggaaaatgatcctccctggcataatctatcgtccccccgtagacctcgagcgattcggccggactcgtcaagaacggacggaccgtgagcgatccttgtcgctcggtacgtctcgacgagtggggttgatgttgttgttgttgttgttgttgttgttgttgttgttgctgccgatgatgatggtgaagatgctgatgctggggggacgaccctcgttcgtgtcgagcataggcgtaggacgacctcgaatcctcgtcatacggctgtgccctgcgttccgaggccgattcgaacggggacaacctgcctgacccgctagcgtgcatggtagacggggtcgcatgggtatgcgtcgagggtgtctcgtaattccgaacgaggttcgagtacgagtatccctggacggacggtctcctctcgtcggcttccatggacccgttcgtacgtccggcgtgatggtgatggccatgcaagtgctgcgcagcagatccggtgctcaacagttgactgagaggcagagcccccgtagcgcttcccccggacacggacctcgctgcgagcccatgtggacgttgaacgggcaacgggttgtggtggtacgacgaaggcgaggtcggtcccggtcccggtcccgcggccgacgtcttgaagtagtcggcaaacgccagtccggcctcggcagaagggttcgaggtgtgaggttcgaggtggatgcttcgtggcgaggtcatcttgcggtaggttctgtaatgaggtcaacgtccggtgtcagcatggtgtttcgtcgtatgtaattcctgaaaagcgatgcgagctgaaaaattgacgagtaggacaagacgctccgacgtcgaccctgcttcagaccgtttcacgtcgactccgtcctgctcggtcatccactatgttttttttcctcctacagcctgctcgtctccgcccatcgaatcaagtcgagtcgaatcgaatcgaagcaaaccaccaccaccaccaccaccaccaccaaaaactcatcgcccggtccatgtccgagctcacctcgattcagaccttgtgtccactcgtctcccgatccctcccttcaattttcaggaacgatcccaagtcgatcctgatctcctttacaagcccgtccgtttcttcttctaagaacaagtagtagtagcagtagcagtagtcgacctcgatactccgtgtgttcctggacgttcccgtcttgaactcggacgtcgagccttttcttgctttatggactggactgatcccgctgatccgtctatcagtatcagatgatagagcttcaaatccgttcaagctagaccaggcgaagccagactaggaaaggaaagcctatccgggctgagaccagatccgaggatgtgtaggctggaatttgtcgaacacactaagagtgccagtgcgagtgggcgtcggggaaagagtgagcgtcgggctagttgaccgacgggtgtgtgtgtgtgtcgagtgtgtcgatcaaaccgagaaaggtccttggatcctcgtacttgtgctataacccccactggcttggccacttggccactagatcctatggtcggttctggaggaggaacactcgaaaacgagctgacaagactcgtcgacgcacgggtcccgacgacgacgacgatgtcgatgatgcgcgatgtcgacaatgaggatgtcgacgacgacgacgacaatggaagatgcaaagatggggctggacgacgtcggtgggtggtggaggatgggctggctgatatgatcctcgacgctaactacaacaagtctaattacaaacgactctacagcgggcaacgaccacgacgacgacgacgacgatatgaaagcgaatcgatgaaaggacgaatgcgatgcagggatagtaggttggtcgggtgagtcgatggaaggatggatgggtaggtggccagggggtggggtggatggacgacttgcgcgctctcgcctctcgttggctgaaatcgtccgagagtgtgcgtgtgcgagcgagcgaggtggtcgattcccagtgtttaagaataaaagggagaggtatcacctaacaaccaaacaacatcgtcgtcgttcgtcgtcgttcgtcgtcatcggcatattccacacttgattcgcctcgagaggtgtcaagctacactcatgtccatgagcatgcgatgatgacctgatatcgacgtcgacgagttacttgtgacacactgacctgtggaggcatgagcgagtctccccggatctttgcctggctgttcgcttggccgatccgatgttggttggacagacacaaccctcgctcgctcacatctcgtcctcccgggtggaggagcggatgcaaatttacaccgaccaacagtgggcgaaagtgcccgcaaccacgcgcgtggccgaggccagggtgacaacttttcatctctcgtaacattcatcgtcatatcaccggccatacaccaaagaccaggctctcatcatcccacctacctggagcccagggaccctacccaacacggcaagcaccgaaatactctctccccctcaccgatccatccgatgaatcctcgccgcgccagaagagagggaagtgagtggcgatccgcgagtcgagtgaaatgatcggggtcggtttggtagtccagggtctggaaccaacaagtccggtgtcatcgccgaaacacctcgcgcgacgccgccgcgcgtggaagggggggggaggggaggcgacgcgtacgcgtactctacgagagccgggtgattgaggcatccgagtgtctactcgagtttccggctaggggcgatgtaggaagacatcgtccgggtcagttcgggtaggtttaggaacgtggttaagatcgagaggagaaggaccgagtatgactcacaaagacgccatgttgtgaggagtacatcgggagtgaagtgatggtatacggctccgggccccttttcacacatcgaattccacgctcgaggggtctcgggctgatccccccccccccttcccgctctgccgtggaggatgcttcaagaaagaaacggacgaacaaccaaccccatgagcgggcgcgcgcatctcgactcggacctgaagtaccgtaagtgataccaagttcagcattagcgttcctagcaccagcttatgccagctttacaaaagggtcgatgagcatccagagctgatattgacagagcgagtctacctgcctggtttacttgctaacttctgtgaattcgaggaaccaatcgcaccgctgatcaacagcaagaaatatcgcgttatccgacagcctctcagctcgccaggggggcaatttggtcttttctgtgttgcacaatccatcaacagacctagatctggactatgcgctgatccaagtcacaatgacgacagctggtactgctgaggatggtgacaagagaacgcctcaccagtttcaatgattacgagcgataccccctttacgagcatctcctcgtgatcaacggggaaacatgcgcgcagacgcccgggtctcctgaaatccactgtcggcgacggtctagtcaatcacactggattttatccccttccaggtagagtaaatacattcagagcgaattcgacgtgaaagctctttcgaggggaataagcatggtttgcctcgaatcgaggagatgctcgatgagcataagtgccagccgcgcggacggcgcgtactcatagggtatttcaggaggaaggaaagctcttctgaatcaatggggtgggtagtatacgtacaccaatgctctcgcttcgacttgcgtcagaggccgggcgtcattgatgcgctcggaaatggatcatagccggtagggcaaaggtacacgggtattcgtacaatcaggtttcccagaccttatagtaggggggaggaaagggagtcgccgattcgtgacgatggcatggaaatacagtccaatgacacgtgcagcgcgcctctactcgaagatcgacacggtcttgcatgggatcaatgtgatcaccttggtactcgtttcgtcgctcactcgctggtcgagagtcgtcgtatcgaccctttggggaggaagaggcgaatcgtcgtgaaagcaccaagcgacctggacgggcacggtccatcccgatacgaagcagcagcgatgagaaaaaagatccggtcgaacgacgtgcgatcgaaatcgatctcgaccggctcacctttgagggatataccagggtccgagacactctaacatgaaatcgttggccggcgcagtctacactgcgagagcagagacggatattgtactagtacggatccatggctagttgtgtgattggataatgtatcaacctcccggaccggacgacgaattgaggtcctaacgactgaactcatatgtctgaccctatagtcagtgcagtgacatgcttctcgaccccctaaaactcccgtccattgccacgcaagagggccatggactctccctcgcactctaccttccagtgttgcaacctgactggatcagtcattagtaagaaactatctctttcttgtgactggatgctcatgatttcgacaagcaagctgtgtaccattgatgaggacattgaaggtgccgtcagctcgttcatcagagtaatgcagaccattggagatggtccggtccaccttcctcgtctccttgctatcgccagcgctggagaagctgttcaccctagcctctcgttagcttcgccatggatcgttgaggtctcgcgaagtactagtatatggaatcgatgtgagatgacatgacgtagatagactcgatcgacgtgagatcacaatagtgtcactaccaagccccgttacccctctccttgttgacgacaactcgcaacccgttctcataggtccatcgtggcgccaaaccccctaagggtaggcgaatgtaccccagctcccgacctaggacttcgctcatgcgctcggccgtgaacgctgccggatatccgtccatccagtacctatcgcacatcatcatatcaatagaattgaatggtccggactatgaagtgagaggggcgcgtaacgctaaaacgcggtcagcctcggaagccgctcctcatgtaagccgtctggacgcacggtgagtggcggaaatcgcaactgcgtttgcttcctcttccatgtagcgatcgcctctgcaacgaagggaccagtagctggatgtatgttgacaacgcgagcacataccttcaatattgatggacgatataagcttatggtcagatcggcgacttcacttcgagtcttgacgagcaacaaaccagataaacgacacaacaatatggtcagaccggcgcgaattgaattcgggtgtattcgcactaacctgccagtgaaagatcttactgtcttcgttttcccagtcgagcgacaccataacttgagattgcagctcataggtcgcaggtgcaaaggctactgtcgacggcaagcaaacgtccagtaggcttgcagcccggagaccctcagcgacgcgtttgaccacgttggattcgggcgccaggtcgaaagaaaccgagatgaaggtacagacgaccgtcttagtggtggacctcgctacagagccacacaacgctcgatagccgtgggacgacgtttcgtgatcgagtcttgtccaaaagccggcagcaaatcttgcaggacccctcaaacagtgagacccgtgtgaatcgaagtcaaccgggaacgtctcggacacgcgaccggcagcccaggacagtatcaaagacaccaacattcatattttttatctggcatgtgtcgaagatataagcttagattcggatacctaaggtcatctgtccactagccttgagtccagatgtctgacggctgggttgcacaagcttgagatgacatgtgggcattcttcgcttagagtttatttgaatgtttaatatatatatattttatggatgaaaagcagtcataatggcggagtaccgaagtggttaacgggatgcactcgaatctattagaatcgtcatgcattgctctctgggcgcgcaggttcaaatcctgtctccgtcggaaaaaatctttttgcgtttctttttgttccttgtcgccatcctcctttgtcgaccttgcaaccttggcatcgaagcgcaccatcgcgcgggtgtcttccactctcagcaacgctggcgacactcatcatacactgtgcggcgaccaaagcgggacctgactctggacgccgatggtccttggctgcgacggacctttcaagctttaatctccccacgctctgcaaaatcctacagcgatcagccacgtactgcatgattgacaagtactgatctagcttcgaccaagaccactttccttgtatcatttcttcggcctgcgcatcgcgatacactccgacgcggtgttcacatcgtccacctgaaccatggtttccaacgcgtcaaatccgacggagttcctgtttcattcgaatcgagaacctttggcaacaggctgaactgtaggaccgcctacttgatactctgaccaaccgtatactcgagactgaccggtggctggaaagacgtctcgcgccgcacatacaagtaccgtctatgcgtgtgtttcgaccttgagactcgcgtttcagttcgagcctgcgccgcgtcggttgtttcaacgcccgaggtgaagtcagacccatcattcaacttcctggctagacgatcagcctaagaaggaagaatgagcttaatatgtcgccgattcacggacgggtttgggttcggtcctacccggttcgtggccaaggactcgatcgtgtagtggaaggcaggcggaacaagttcggaggggattctagacagcctcctctgtacgcatgttttgaatctgtagaaggtctttcaatacgtcacatatagactgctcccgagaaagccgattcgcttgtacttgtaaggttttgatccctcaaagctacttgagccggcacgaggatcaatattctatatgcttcgagcggtcaaccaggtcatgttccagacgacgcgagagctgttctatgctgggacggactgagtagatctcgacgaggctcggcttgtcgtgacataagggggaaaattcatagcgtaacccgcagtcggatgcttctgtgttgcagctgcttccataaagcgcccgccccgcgccacgtactttcggcagaggaggaaaaggattagcatcgaggaggcgtcgtttcacatccagacgatgactcatggcacatctcaaaactacggtcgatagagccctatcagtcaaagtctgcgcgatacttagaaaggtcctggcatggtgattttctgtagtggcgcgccaggcccgctgggagtgagcctcatgacagatggtttcgcgatctgatccgaggtttctcgcgacagcacctgtgagccgggtgccacggactatggctggcatcacatccgtcgatatagcgagtggtgcggctatcatacgagtgcatgattggaagtaagaagtcgatgaacctgcgcttgatttcgatccgcggtgtgtgtgagagatcaacctggtcatgatcttatgattacgtcacctgactttcgcgtttcaaagggtggatcagctcgaatcagctcgtcagaccatatcaaaaagtttacatcgatcaaagattcagcgacttgacgtgaatagtatcgtccatccatcgcgacttgatcgctagtattttacgttgaatcgaggcagagacaagttcagaggcggaatttcaccctccccgtcgctgccagacgcctcaccatcaccctgaccgctgtagacgttggctcgagaccagtgagcgtcgggatcgactgaatcaaccggtactgcgcatcaacccaatgctcgcaccgtacccggaacctctccttagatccgccaagttgcccgaggaaactaccttcaacgcgaactacgacgagtttctggaaatgttgaaaaaggacaaggattcacctgagctcgacgacggctggaaattggcgaaacaactatggaccaccagtgagtccccgtccgatcactctgcatgaacatctacacctaggtctacgatctcctgactgaccccttcctgcattggacccagctgaagagctcgccaagatccgcgaggcgtacttcacattcgagaaagctcaaaacagcctcctccacgaggtcgtcacagatcgcgtccgtggtcccaaggtgcttcagtacatgatcaagaacgctagggccatcggcgcggagcctatggatttcgctaccatgtggcgtcccgactcggagggatccgaggatgggagcgatggtggaaatgaagggagctgggaagactacatgtgtgagcaccttgtgagcgtggcggagggggtcagagactgatcttcttgttgcaccggggactctggttacaggtgtcaaggtcaaatccggtagttgcggaactagtgattctgggaccgatagcgattacatcgacgaggaagaggccgacgaaggggtcaagaaccaggtcgaggatggggccgagaagcaggtcgagaagcaggtcgagaacgaacagcaagccagcattaccaaggcgaagacggtcgaagccgagattaccgacaagcccgatcccgccgaaaaggaggacggtgccctgtcggacatccagggggtatccgaagtcaagctcctcgagatcgagatccatgcgaggctggacaagatggatcaagacatggcgaattgcttgaagaccttgtccaccgtggcgggcatcaacaagcaggatgaacaggacgacaagcaagggactgccgagggccgtgtcaagcccagaactagcgagattgacaaggatcacgtcaaggtgagtcgagatcaacagcacctcaaagtggggcgctcgacctgactcgcccgtgtcgacttgtcagtgggcttggtacgaaaagccgttccacgagggcggtgtgcgagcagcccagaatcgggagctaagggccgagaatccatccagaccgccgcagcccatggacgccatcaggagcgctacgaacgcctggtatgacctacagaaggataccattgacctccaccgctcgctcatcaggatggatccgatcacgcacatgcatcgttgcaccttgcccatcgtgccgtaccccctcggcacgatcctcaacaaccccatcttcagctatgccccccagggtccgcatgaacagtgacccgagcaagggcgatcaaaacgcggtaccaaaagtgacccgtccagtaccttttccctcggcccaacgtttccgttcctcctgaatgtatgatttccaaagaccagaccacgttccctacgacttccgcgcgcgacaatggtcggttgtgaccctttatggcatgtcatttttgtcatttgtagtagttactcgcatgctagaaacaagaacacgaatcgtctagacccctccttgtatcgcatccgaatcaccttttcacccgacttcactcctgaaccccgatctaagggttcaatcgcttagggtcacgggggaatagcgaagctcgcctgatgttacccagcttcaagaagagcatgacgactcgctcgagacctacatggtgcggcacgtgaaaatcagcgtcagcggctcacacgggcgagagaagccacgccgtgactcaccgattccaccaccggcgtgagggggagcacccaacctgaacgcgtcaatgtatccctgcatgctctcgggtgcgattccgacctccttcatcctctggatcaaaaactcggggtcgtgcactcgctgagctcccgagaggatctcttctcctcgcatgaaaaagtcgtacgagttggagagcttggggtcttcagcatcaggcatggtgtagaacggtcggatggccagggggaacttgtcgaggatgtagtagtcggttccgtacttttcctttacgagtcgaccgagccacttttcgttttcagtgctgtcacgcgtcgccacaggggggaagggcgatcaatacgttgcgcaatgacgaaccgagctcgagggacgacccggggatgctcacctcaaatcgtcactgtcgctcaactcggacccgtccaagtttttcgcgccggcgtccctcaacatctgaatcccctctgaaaacctcaacttcaaggtctcgtccaaaaaggtgaattcttcacaagggaactgcttcctgacggcttcaatctcgtgcgagtaggtctccttgagacccttgaagatggcgaggaagagcgagtcgaggacgtcaaggacttcatggtagtgctcctcgatggccatctccaggtcgagtccggtgaattcacacaagtggcctgtcatgtccgggatcacgggttcggttcagcgcgtttgtcattacgagtctgaccaccaaagtctgcaactcacggtgggtgttcgagtcttcagctcggaagactggcagaccgccacgcaacgaaacaagatcagcctttgttgcccaccccggcgcccacccacgatccgcgacgacctaccgggcgcaatctcgtaaaccctctccatatccccagcgatacacatctgcttggccaactgggggctctgcgccaaaaaggcctttcccttgaaatagttgacctcgaacacgctcgctccggattccgtggcggctccctgaagcttgggcgagtggatctcgatgaacccgagcgagttgaggtgggtacggaagaggttgcaaacggcggattgaagacggaagatggcttggttggtaggtgtctacgatcgaggtctctagcgggtcaacttcgatgcatcgtgttggtcgcgccctcaaacccccaaaactcaccctcaggtccataacccggttgtccaacctagtgtccaaaccgaccctagcgaactgagcgtcctcctgtacgtacacacaccgcgattgaacctcacgaacatcagcccctgagcgtccaccctccgctagccctagcgaacgcgcgctcaccttttcataatcagcctcgggcctcgaagcctcttccaccccgaaaggcaacctctgcggggcctcgacgacggtaaagacctaatcacccccggcattccgcgcaagtcgagtcgagtcagatcggcttgctctcttttatgggcgcacaagaggggcaacggggtgcgtgtggtggactcgcctttttgatctgaatctcataagtctggatggtacacgacttgacttcggcgggtttgatgtacccctcgacgaggacgatggattcgagctatcatgggcgtcgacgttgtcgtcgacatcgaggtgcgggatcagtatcaccctcgaaacaacccccagctagacggcggcggcgaccctccggcgaccctccggccgactcaccgaaaccccattgacccacttgatcatctgtttactgacgacctcttcctccccgtccttgctcagccctaccacaccctgtagggtatgagtctgttgtctgagttggagaaagaccatcttggcgccctgagctcgaacgttgtgcaaccgggcacggaggacgactttttgttcgggggaggggatggaggaggaagggcctttatccagaaatcaccttcaacctatcatcctatgacctactacctctcacaaacacctacacaacctctctgtactctgaaaccaacacctagtcactagcatgccagtaaagaaggatgacctgccatccatcgtcggcaagtacatacgtgacgtcgctccagacgctctcgaatcctacctggaacaggcgggtttgaccgaacagtgagcacgtcgagacggcgacgaggtcatcatcacgcacccacggtgtgcagaccagcaagaaaagacagagccgactcctggactaatcgtactggttccgccgaacaggagtctgaacaaggatctgcccgacttgcggaccatcgtcgaatcgtaccaatccacccagatcgccgatcgcctagcctcgctccaactcgtccaggacggtctcgtacgtgatggtctcgtcgaggatcccgtcaagctggcgatcaagcgcaagatcccagatggattctcattgaaccgtgtggaaaagactatcgagggcgtcagtgcggtgaacctgttgggcgtgtgggtggacaagctcgctagacggcggtttgacacggcgaatgctaggcgagtcctccagccgcaagtgatcacgagacgatgggtgtaaactgatacggttcacgtcgtagttaccaagcagactatcccgaacgaattatcgttacgtcggtagacaagacgctgaagattgtcgattccgagtctggcgaggcgagttccccccgcaagtctcgaggtgatgccagtgccgagaagctgatacaggcctttctcgagtctctttaggtcgatgccattttggagccacacaaggctgcgattctgagcgtggcgatacacccagtttatcgacgatacatcttgacaggctcgatggacggctcgtgagtctgtcgcaaaggctcgacatgatcaggttttctgcacctaatacgaaattcttgctctgataacatagcgccgtcctcagcgatattctcacgtcctccccagttcagacgttcaagcataacaaatttgtcaacctcgtcgccttttcccgcgatggcagcttcatcgctaccgcaggacacgatcgggtcttgaacgtctacgcagtcgacacccctcacgagcggatgaaagaggacgacctcgagctgctggatgaaggggatgatgaagtattggccggtgagccgacattgaggtacaagaagatcaagtccttggagctcgagaccaacccggaaggactggtattcaccgatacgcacctcctctacacctcgagatcatcgcacctcttgcacttcctctccctgcccaccgagacggctggagggttcgagacgaggacaaagagcttcaatccatccccgttggacacgcacgtctcgttcagcgtcctctacctggccttgcacccagagggcaagctcgtagcgtgcatgaccggggacccggcgacgacgggtgccggcgagcgggtcttgatctattcgaccgagttgcacgaagagatccggggggacgagctcgtacaggggctagtcacaccccggccgatcatggggagtgagggcgagaggttggcttgtctctggacgggcgaggtgggggacgagtacgtcttgccacggatgacttggttgccggacgggagtgggatcatgtgagtctgcgcgcagggtctcgtgcaccagggtcctcgagctgactgtccgtggaccgtgctagaactacgacgacgtcagggcacctcaacctgatcgacctgactggatcgatcaagtctaaattccgcgctcatggtgggacgtcgaacgggaccgagctgtccgggatcgtcagggacgtcgccatgctcgggtccgccgatcgtccagttagctggcgggcagtcagtgtgggatacgatgggcgtatacagatctcagcatgaaggcatccatgtcgtgaattatatagagcacggcggtctctcgtgatatatgtatcgtctatgtctatacaacgttgtgaattgtcggggttgcagagtaccgcgtatcagattagccacggcctcgatcgcacagtcggatacctatacgtaaccagccgtcggcaccagggctacaacaagccagccaggccatttcggcgtctggagggagttcgacaccgtgcaagaaaggcaccgccaacgaatagaggtcgttcgaggtcgtgggaaagagtcctggaaggatacggcggagcatatctctgacagtcgtcgctttgcctacaagcgcgatcttagcctaaggtcggctacggacacttgcaggtcgtccaaactcaccttcagagctgaggggtccgatgacgtcttggatgacaggaccgtcgcatggcaggtataatttgaacgggatagctcgggccgcatagaccgagtcgggcaaagtcgatgatgtggcgatcgaggcgcctcctgctgcacctgcaccagactgcgagtgcgagttgctcgaggtgcccccattgtccgaattgttatgcaggccaaagggcagaggcagcgtcttgtgggcgaattgtgcttgagcgtcatagtcgcctggtcgtcgtcaatgcacagacgatcagcgcgagtcggacagagaggttattccggcgattcggtacataccctcgacgatactgttccacccgctctccagatcgagcctcctcaaacccgtcaccctcctcgtattcccccaccgggcataatcggcctccttgatcaagctggtataccgtatccggcaagcttcaagcgagtttgacaccttgggctttgtcgcgtcggtaaaattgggatgagggtgaagatgaaggattaaacgcagggtttgagcgtgggtcacggacgagtcttcttgaggctggttgatgaagcagataagatggatgagatccagcggccagtacctacgggacgcgatcgatcagatgaagaactttgaaccgaggagaaacggcaaatacggcctgcgatttgacgtaccatttgcagatctcgccgttaccatgggcatcctcgccgtcccgactagaatccacctcaaaccaccaatcttcggtcggagatgccagcgattccagctcatccggagccaagaccgacttgacaaagttgtcccgaatctctggtagtatcaccggtaggtatgtgtaccgagcacattgcatctgttgcacgacaagtcgcttgttagctaggagtgtgggctgcttaatgctgggccgcggccgataacgatgcactcacgtagtacttgtccataccggcagctaccccacctctagctccaatgtcggttgagaatcctcttccatttccatcgtctccctctgaggcttgtcgccctgataccgctggtcctactgccaaactgatctgtactgggatcttgaggttccatgtcaacgctcgaaaggtcgaagcgctcccctgcgccgcacgtaggtggtccggaagaggtgaaggcgacgatctcgacatgttgctcctctatcagttgtagtcggaacaagctcctgttcaaccaaagtcaaggcggtaggtgggcgcgatacaccgagacgagtcgagagcctaacaaaggatgtgttgctcgagattcgggagggtcatgccccaaggttccgctggatgcacccagctgacagctggctcgacttgtggcgtgacagaacgacagtgaggaagcagtctcctttgaagctttagagcctgtgattattgctatggtggtgttggtgtagagggtcgatgcgagggtagcaagttaggtagatgattctgaaatgacgaagatgcacaaggtcgcgaccagcagccgagtaactcagcgcggacctcgaactttcaaactgaccagttcactaatcttacaatcacatctggacactcctggattcaaaagcaacagagctggttcgggtctaggaagcgtgctctgtttctgactagccggcaggtcccggcgatgacgatgtcgtgttaaacgcaccggtcactggactccactaggacgatcgaaccgagatagcccgaacaaaacgacatggagacctgtgacgagctggacagcaagctgcctatcgccagccttaacgctgtggatctaccatacccggaatacagcatcctagacgatggcagcgagggagcttttttaccacagctgagcggtcaggctggagctgatagggtctatcgaggatggtcagcttggaaactctgcgtcgagctacaatctgcacatgagctgattcagggtcattcacctacattattacagggcagtgagagctctggaggcggacaaggattccggtatcacactgagagctgtattcgagcacctgcaatccacgttcacaccacctccaggcatccccgctgcgaaagcgcctgcggacctctttccatacctgcctagctcggccgacgtagacgagatgacaacgatccccaaggcgagcgaaggaaatgacggccatacgattcatggatacaggctccgacggccgacgttcgaggagatgagcgacgtctggaagagcgtcgggatgagcctcttgaggtgggctctggcggctttcgagcgggatagagcggattcacaagaacgggacgaagggtcgcaaaaggcggggtcgtcaaggtctcacgaaccgcccgagcccaccatcaatagtcatacagacggaggtgtcggagtgatcaccatcgcgatcgatcggtcggtctcagctacggatttgtcggtcgaaggcgccgagacccagggggacgggatcccgacgttgcccgactctgcgttcatcgtcaccgcacccgcctcgctcccgttccccgagatatgcgtcaggaggaacctagagatcgaatcgtccaagggcacgaggacgtccatgccggatcaggtcgagcaggaaccggtcgaacccatcaggatgcggaaaaaggcgctgtacgctcaacaacggttcggggtggaaggatccaagtcggtggcattggcatggtaagtcgcaactctgacggctccgaacgaaaatgcgacctcgataagctcatcgatttgcccctacgtaccaaatcgaccgacgatcaccttaccctcaggttaaacgccgtgacggtccgtgaaccgggcgaagatcgatatactcgactagactcggtgtttcagctatatcgagcgtacgcgtatcatccgtttcgatgtcccccactggatcgggagatgttcgacgaggtcctcttggaaagcgcgaggatgggcacgggaccttgttcaccggatgatctcgtcacggggttatcgagtggtcatcaggtccatggtgacggacacggacacggcgacggcgacggcgacggcgacgttgttaacagagggaccggatcgaccgtcgtcaatcgggacgacgatgtcgctcgcccacgcccgcgtctgatccgagcgtctatccgcccgcccgacaaggtcctgcaaaaggctcacgaagccatctgggaatccatcggtctgaactggaaaaaggcacgtgggttcgattgggacgaacacgagatcttgaggaccaggcagagggacaaagaggtccggcagaggagacaagaggagaagaagaggatcgaggaggctaggccggatcgggacgaggtgaatacgggacgtcccgcgggtcgaccgttgggcgtgatcaagcaggtagaggtcaggtccaaggtggtacaagttccaggtcggatcgccccggatttcgtcaccgtctggtcagtccccctgcgatcaggatgtcactgatcctcgcctgcgacgttctgacccgatcgagttcgccgcgatccgtttcacaggctcgcacagacttaccgatcgtgtccgccaggccgggccacgccacaacgagaactctggcaagcgtacacccaactcgtccacacccattcgacgacgtacaccgtgcaactcgaacaatacgcccaagctcggcatgcggccgtgggggggaggacgaaagcagagtgggactcgctaggcgtcgagggggaaaggttgggaagggttcatgcggccctgacgaggtatatcgcctggagaccggcagacgtgtttgagctcgtggtgaggatgtttggggcggcgttgaggaggatggaggatgggtcttatgggttggacgggttggagagggttcggtcgcaggtgggatgagaatgggggagcgcgacgctggcgttctcgcggtgatatgtagcatcatggcgagagtgagcgagtcggtaggacgagactcttgtgatgaagacgctcccgggttgcgcccaagcgagtcacgatcaagtacatgaacccgagtgtccatcctcgacccgtcttggccgacgttccctgatgatccgtgatcggaacctgtcggtgcagggtcgtctgtgtggactgacatttcggatccgaaacgacgacgacgatgatggtgatgacggaagcgcggaagcgtaattcgcgtaaaaaggccgtttgtgtagggcgaggatggagagataaggatagggtataaggttggatggaccccgccatagacacgattacgacgtgctcacaagatctcattgatccgttgaagagaatatgatctaactcgcgagcacgagatggtgtggtagctgctgcgaggtcgggtcgtcgcaaaagataaaatgtcgactagcgatcacatcgacattgacgtcccgcgcgggcaactgagcaggccaaggtccatcccatcaactatcgagatcggcgacctcgaaatcgatggatagttacgtctctagccggcacaactcgtcgaatcccaacaacaacgggaactctcgtcctccttagtttaagcttgtactacttgttactatgagaccgtatgatctgtgtacatctacgttctgaatcgaaacgaggacccggtctggtgtgtgtgaacggcgactagatcgatccattcgtcagctgcctgcttggttgccctgcccgcccgcctctctctccttcgctcgtctctcgcctttgacaacggacacaaaccatccgataaaacgacccaatcaacctgctacaaccaggtaactactagctaccaccactttgaccagcatcacaagagatagtagtagatagtcggtagagaagttcaccccgtcaaccgtacagccacgtcgaaagctaccaacgatcgccaccaccaccaccaccaccaccaccacctcatcaaaggcaacgacgcaattcgaacacccgactcgacgtgcccctccccccgatacgcactttcaacaacactccagactacacgacgacgacgacgacgacgacgacgacgacgatggctgaatcaggttccaaagtagcattgaagaggaagatcctggtcatggggagtcggagtgtaggtaagtgggatcacgagtttccgtacatgtggtcctcgatatcgtcgtccgttcgatacggtctggtctgggtcgacgagtcggggaattttcacgagacaccctgccgccccggtgctggagaagaaatcaggaggaggatggaagtgcacgcaaggcgattccggacgcagggatcatcaggatgaacatcgaagccatggacgtatgaccctcggagacctcgtcgatcagggcatcatctgggctgcggtctcgtgcagtgcccgttcttgatccccggtccgctgactctgctatactccatctcattcttgttgcttgctacgatttgctctactctatcctttcaacggcatcttacatgacgattttctctatcaaccatcctgaccatcctgacaacgtccacccccgccgtcgccctcgcccggcacaggcaaatcatccctaacctccctctacatggaaaaccaattcaacgactcgtactaccctaccatcgagagcacccatcataagaatatcgtacacgatggcacgacgtacgagtgtgagatcatcgatacggccgggcaggtgagtcggggatcggttcacggctcagacgggcaggggtcagggagctgatgtaccccgcattgctaacgatatccggccgacgaactccccgggtataccaggacgaatactcgctcttcaaccacaagtacgccgtagggatccacgggtacatcctcgtctactcgatcgcctcgaggcagtcgttcgagatgatccagaccctgcacgacaagatcctggatttccagggggtggagaaggtttgttgtgtcgtcgtagggcagaagagcgatttgggaggggtcaggttagtctacacagaggcgaggcggggtcccgcgtcgggttgggtcggagtaggcaggctgatccgcatacccgctgcgtcgacgatgtaggcaagtcaagaccgatgaaggcaggtccgtcgctcagaagttgggagcgagtttcatcgaaacgtcggccaaggataacaagaacgtccgtgagtacccctcctgcggccggctgatgacacctcgaacacccccggttgaccttgacggaccgatctcgctcgacctcccgaacccccccatagaacaagtgtttgacctcctcatgattgaaatgcgaagagtcttcaacccgccccaggaaaagaagaatgcaggtgggaaatcgtcgacaacgacgtcgtccacctcggcctcggcggggaattccggtggaggttggttctccggttggtttggcgccaagaagtaggtcctggtcctcgtcgactctggactcgaaggcggaggctcgcacggttggctcttcttcctaccaccacccggaatgaccgacctggatggggaaggcagactcggatcatacatggacaatctctctttctcgcttccatcagttcctctcgtcccgctcgtagttttccctcgctttctctctttctctccctctcgtcggctcctggacgggcaattccatcaaagggcggcttcggcttccccgcaccctgatcttccctcttcgctctaccttcgagtcgatcgatccgtccgtcccctccccccctggcctgtacgatagtatccgccctggacgcgcgaccttgtataatctgggtcgatgggccttgagatcccgtgctcgacgacatgcgccggcgtcagtgggtctctctgtacaagtgtttatatacagtcttttatacatgttcgattcggtcttggttctggctgagccgagtacaggctaggttggtcccggttcagacaagtaggagctatccactgaagctgtcgagcgcggtgtcatgcagggtgctttagtattctgcaaggatttcaacgactggaactgaaagtctcgagccgggatctccgagatcgaggcgaatgacctggagaacccgattcagtctttcagcgctgaacccgagtcatctggcagatatgagacctcaaggggctttgagcgtagattgagtacaacaaggcccatgtggataagctagatagcgggcagcctaccataatcgatcccctcgacgttgggggacttcaccaatgactgggttacgaaactggaaagcagctcgcagactgtatcgaagtcttgactcgcagctctggtaaatacagatgtcaagtgagattgtcgcggtaatcgagtcgtgtccccaactcggacgtgacccgcatacgcgtgtgagtaatgcggatggtccgcgatggacttccggaggcgacgccgggcgcggttctctcgtaccctgaactacggaatgtcgtctcctgaccagtctgagacggttaccgaggggttctgggaagcagctaggtgggcgtcattcaaggcatcttccttcctcgtctcgcgtcatctggtccgctacagtttgaagacagctggtcgctgaatggtgagatcgcgctcctcgtagcgacgcatatctggttgatgcgccatctgtttctcttccgctattttgatcgcttgtaggtcattgtctagactcggcctttgaagtggctgctgcggtctgtctccctgaccaatactcgggacagcatctgccccacagtcgatgaatagagaaggttcacgtgacacctgagctgtgctctggcccgagatccaatccgggcgcctagtaggcggacgtttcacccacttcccaaacagcccaggtcttgtcctcggactcgtcctttcaaaggctctatgctgagctttgatacgcttatcctcctccttctttaattggtataggcgagcttccgcttcgatcctcaacaggcgctcaagctcggtagccttcctgatcttgaacgcctcgatgccatcacccgtatccgtgatttctgccggctgatgacgattgtctttgggaggccctcgtttgcgtacaagccttttccgctccttgaccaccaagctgttgcaatgactcggactcgacacaccgctcccggtgttgacagtactgttctcgaagaggttaactacatcgcttgcagcgtgcacgtctggaagcatgacaaggttccagtaacgcgaagcaatcgatatcccatctgttgcttactgaaataagataccgcgtcctcctcaagccgctgcctcctggtcagccccctcgtcaatcccttgggctttttcttgtcctttttcacaatggttccctcgacttgactatagtacgtactcgaatcgcgactcgttcggaagcacgagactaggttactaaagcagcttttgatcgtgcttgcgattgaatgagccgagatcgacctgatggagactggttgttcacggtcggttgctgtgagcgaaggactgacatcgagctgtacctgttcagcgatggcatctagatcatacccggtgctccggatggtacgatacgatatgtcgctattttgggatgctttggagtcgcacgataattttgaatggttggaacgctgggaacggcgagatccgtaaggatcacttctgtacgagagataggtaggtgcactcatggctcgatggtcgatccccacgacgtatcatcaagaggtcatgtacaagcaagatcgaatctttaactcttcgaagagataccatggtattcagcaaaacgtccctccatatctacgctgacgttaagcctgtttcagtctgaaaccggggcaaccgttccacggggtgacgatgacgccatgatatgaaagggtggtcttcaggcgtagcagcacccggacgttaacttgcgcgtgggagtaagaatagcacttctgtgttctcatcgaagttgcattgacgtagctcgattgccggctgatacggcggaaactgtggtaggacttcacgccgtctttcgcacggggcgtgtacgacgattatttcactcaatacactcttgtgacgctgcgagcgtcgctatctaccccacatcaccagcgtttcatctattttcgcctcgaggcaccgccaacttgggaagaatcgggcatagttgtacttaccccacgatgagaaccgatggacagaaacaactgaccgtttgcctttttgtctgacatgaaacgcgaagcggaaactgatttttcgcgtcgcgtcatttttcgctttttgttcggatttgagcgaacaaagggagatcaacgacgatatcagacaggtccggtagattgattcgagtctatatcgacagtagttttaccatgatgcagactaagagcatcatggtcgactagctcaagccatcgtccgctcatgactcccgttccaatgttgaaccttcgcacgaccaccttcgtcctcgccctcctgtgtttgcgtgagttctagcaggccgtcgtcacttcaagatgtacaactcaggattatctgctatctcttgcagtgggctcgatcaaagcgattcgttcacaaggctcggcaatattgtccggtatcaaggccctcaggatcggctcagcgaaccagaccatcgtccgacgtcagcagtcgacacagctctgcgcgaacaactattgtacgagcctggacgctcccggcttgggaacccttcaggtaaaaaaagtggtcgacggtagatcgatcgttgcgtttactaagcctgtaaggttctctctgccagaaatgcaaacccgacgaccagccctgcatctgccaagcctcgcaacaactctcatcttcttgtctgagctgccatagtaatctgagtagcattaccgacagtacgtcccctctcaatgtcgtccgtatcagactcaaagtccacgtcactgacgcagctctttgtagtcttcaatttttaccaagaatgccgcttgatccccaaaccgcctaccccggatacatgtcgcccgctgtgttctgccgacttctctgcagtgaacgccttgtccgtgagtctctcgtgcggtctggagatttggtagctaacggccgtttgcagacgtgcgggtcagaggataatacctgcatatgcaacggcgtcgatcagatatcaagtcttccatgcttgaactgtattatgtatctcggcggccgagaatacacaggtgagtccctcgataaacctcctgatactgatcgatctgctgacatagctcttgtgtcgtaggaagcgacgtcaagcagacctgcctcgtctcctccaacaccctcgccaccgctctccgcccatctagcactatcacacccagatcgacaggctcgagctcccccacagcttcgtattcgtccgaagctgtcacgtcggccatctcgatcgctcagcctacttcgaacgtgactgggtctgcggtgacagagccaaccggatcgtcaggcaacggtgtatgtcggtctaaaatcacacgaggcatcgttgtatcgcttggggtggggattgtaactgtcgccttagtactcatctaatccgatgaatatttcatacaaccggtcatctcgagcgctgaaccagtgtatgctgtgcagattgcacggcggacctcgaagcactcgtacaagccctaatttccaatcgaccagtctattttgtttgcaaagagagcattaccatactcgacctagaacctgtgcgggctcttccacttgtcccggctcatcctcacgaccaaggcccataagaacccttcgagcacgatcattcccaataacagcgctacgaagaccgctcatcaacaccgcgtttgttcatcgaccaggctacctcgactactcacgttgcaaagcccacacgccgtaactacccgccaacgcgcccgtgatccatggaaacaaggccgaaccgcattgaccaagtgcggcgatataaccgatggccccgcctgccaaatccgggtctagcgacgccgccgtggcgttcatcatgatagggtatctagtagacgagtggcagtttaagacgtacgcgtcgcggtgagaatgcgatcagaagtgggcactcacatgggtccgaggacgagtccggtaatggcgtatgcgacggcattgaccatcacgctcggaacatgccagacgacctaacacgctccggctattcagacaattcgcttttgggacagttttgaagcgcatcttcaacttaccaaaaccaacgccccggccgtggcagtgtaaataaagacgacgttctgctcgctcatccgtctcgatacccagatctgtgcgaccctaccgatcatcaaccctccgaaaaaccctgaactggtataccccgcgttttctccggcacctctgacttgcacgaggtacgtcaccgcccagcctccgatggtgacctcgatcccgacgtagatccaggtgaagagcgcgacgacgtggacaaacggcgaagagaggatctttagcagcttgtccttggcctcgagtgcttccggtgggtcgaggtccggtttgagcggtcgtccggcctcgtggtcgtcgccgtcgacatcgtgatcatcctgttcggctaggacgtacccatcccgttcatccggttcgtacccttgctccaggaacaacaccccttccgtcttgcccttgaagatcccccagagcaacgccaggtccaccacgcctacaaagaccgagcacaggtagaactcttgccacctcgctttcatcccctccctcgcaaactgagtcccgatgagcggggtcacaaaggctcctaatccgtagacggcgtgcaagaggctcatcttctgggaaggcgagggaaggcgggtggtcaaggcgttggcgttggcatcttgtaaacccatcccgaggccattggggatgaatgagaagaggaagatggggaagggaggtttcgtagcctggatagcgaaagccagagtctagcgggggcgtacaggcaaggcatatgggaaatggtaaatcagctgagccttgtctacgccccagagtgcgagtaccgacctacttgacaaccggcagcgaatcctacggccttgccgaacccccatcgggtctccacccagacgttgatccccgcggcgagtgcgaacccgatgaaagcgcagacaaagatgagggagacgatggggtaggagacgtcgtagtgtgtctgaatccttagcaagagtggacctgtcgaggcgtcactccagcctgcgaagagcaatggagggtgagttagtggattgcagtatgtattccgtctcactgtgatatcgaatgtcatgggggagcatgccagacttgcctgcgaggaacatcaaccagaagagcgcgcccatccacctccactcgaccgacttcttgagagtcccggtctttcccgagcgacttccatctcgatcgctataccccactttatcctcatctaacacttctcccgtctctgagagagaaatcgaggagcgggaggtggtctgaccttttcctccgaacgacaaagcgtccagttcgatatcccgttcgaccgtcgatcgacacgcccgggaccgttccagggtggacgtatcggccgtcatcgtgctccgtagaatgggttctcgcgggacctcagagcatctctcgatcgagttgaaggttcaacattctattgtatgggtcggatgtcgatggtcgagctcgaatagatcagggtctttagtagctgaacgatgaacgaggtcctttgacatattgttcgtcatcgacctccactcgcttggacttcgggggaattctcggggaattttcaaggtcgatcacgtgatcgaccaagtcaagataaggttcgtggcttttggccgttgccttctgttcggttagaaacgagatgcgcatatatgcgagcctacctttggatcttttgatcgaatttgatcgggctcgaacggcgatatcacgcatgctcacgcacgatcgcgcacgttagatcttatgcctctcaggacggtgaactgcaaggagcaacaagttgcggcgggacagtaacaccttgtgctgtaagaggtggaatgccgcaacccgatagcttgttgtcgtcattcatagaaggtcgacgacgaaagcaaaaggaagaaaggggataaacgacagagaattgaaggccagggggcaagacgatgaaatctcggttcttttcgccgtcgacacggaggcgagtgggtcgagaccccagatttctttgattaatgaatcaaaagtgagacgaatcattctcgcggcgactcgctttgatcgcttgacgtctgctatcttgtgtttgatttgttatcatcatcaatcccgtccggtcgtctcacctcgagagtcgttctcgaaacgtcgttgttgttgatacgagcgataacgtccgtgcgcggctgctcgtctgaagacgaagacgtcgttgaaacgttctcgatcaaacactggcagcgacgacgatcaaacatgcatgtcggaaacaccaacgtagactaagcaagacgagtctcctttccctgcgctacgagagatgatgggtcgatctgtgttgacttttgatcgcttaaccgattcgatgatgactgaaatcgacgacgatcgatcgcataaagacaaaacgaatgggaaccgaaaagaaaagtctgaacatcatcatccaatcatctgcacctgatcgaataaggatgtcattgatcattgacaacaacgcatagacagacattctagttggcatgacctcggcactgggagacacgttacagttctatagtcggtgagcatagttctgggcagagtgccgcgtcgagtgagagctgacaacagagaacagaacgcaggtcctttgacgcatcaaatctcacagtaataagggtgatggtctacctagaagacagggaagagaataaatacctgattcttgacccggcatagcaggtgtccccaactacccgacaagatgctgtcaccacctccagcgcatcttcgaaaccggacgacgacgtcgaccatgtacaatcactcttcctttgcaatgtccgcacccaacattctccgctctcgtggagagaccgtacccataggtcgaacgtttccgggaaacatcccgggcgagtatgggagcgatcaggagaatgaacacggatatcatgggacacaaggtggacctgggatcagagaacatcatctcgtcaccccatactatccgtcagcatacgacgaccggtctcgacagacttcaggaagcacctccacctcccaagcttatcctcacccgtctccgtcctactcgatctccagctcgcaccgcactctacccaatttggccccttcttccggccccctcgcagctttcggtcaatatcggagtaaaaaggctcgtcgaccgggtacagggtccacgatcggttcgacaggaacgggaacgacggccttggaacctgccacgccgtcttcgaccagatcgcctttatctcgcccacgaactcggctggaatctcaaccaaaacaagcaccgtccgtactctcctcgggcttatatcaacctgctgcaaggacggaattgcaatctcaatcacgatctcgtcctcagaacgtcccggccgtatcaccggacgccacttctgctctgacactatcgaaacgtctcgccatgattcattccttcttgacgagctcgcaattgtcgtacgaccgaggcgtcgagggggtccaagaatgggcaggattttgggtcggaaggggagtccgggtgagggacttgacgagagatttgaacggattgatcaagggtgcggtgagtccatcgaagacgtgcgagacggggtatgtacaggtcgatcttatcaacagacattcggatctccctagttgtcgcttcacccgaacctgccgctcgtgcagcggataatgcaatccccgaggattcaactgcacctaccgcccaatttgcatcatacacatcctttgctctcgtcgcaaggtttctgggagatcagcaagaagaccgtcgtcgattgtctcgtccaggccgacaggcggtacaatcaggcacatcaagcagaacaacatcccatagcgggaagaacaggaggatctaggaaacagagattcaggtcgaacagtgggtccgacctctatgccagagagaatcgaatggagctcgactttcaagcccgtgatcccgaaaacaaccctgtggtggatctccagacgggctcgggtcgcgtgacaccatcgacgagcggatcgaccttgtcccgattcctcagccgctcgaaccgtgaaaaggatcagaaatcaaaggtttccatcgattctggtcggccgaattccatcgcatacgacccgcccgtgcaacgcgcgcaagaccagaaacctcgcaagctcgggtttttacgtcggatgacccggtcaggtcgacaggaatcgtcttccaacgtctcgaccggtgagtcgtacgacgagacgttgacgagcaagacactgggcacgatctttggtgcttctggagccaagatccggtccaaggagaaattacaatgcagaagcggggggaagttcaaggatgaagacttacaagtccggagcgtggacaggacgatcaggccgaaagacgcttcacatggcatcgacagcgcgctagccgatatagcccggtcaaacactttggacgcacatcctcacgggctgcacgtcggcacggacccgtcagccacggctgctaccacagggtattcctcctcgagcaagctacgggagcaacaagcacaggaagtgctcctcgcctacatctcgaagcgcatgacatcttgggatctcaaaaaggagcttaccacagagccgacggacgacggagagggtttgacggcaagcggaagtgagcggggcggagcgatccctggccctcctatagcttctcgccgtccgagtcgcagtagcgaggtcgaggacgagatcggtagggacagtaagcgggcgatgatggagcttgaggcgcttaacgcgaaactagcccagatagagtttgaggcgagtcatctttggaacacgcgcgtcaagcgacacggctaatattcggccacgaaatcttcagatgattctcaattgcggtcgacattttcacccggctattcagtcggctctgcacaaggtccggttccacatgggttattgctcgtccatccaactcgtcaaacgtctcaacgcgctcgatcgcgagtttcaccgcgacgctcaagggcgcgagaccgaggtggagttgtcagatgccgagaaataccgcgtttcaatcaaagtcgaggcttggatgagggttcgatgggatatcatcgatcgatgggagttggccaagatggtcaaggacgaggttttggtcaaggtaggtcgggatgtgcccaatatgtttacgccaacagctgatcaaagttttcctggccgatcgcctagatcccggaggacttgcgagatttggtgcaaagtgctatgcgccacgttctcttgccatcaacgccgcttccccctttccgttcgagcgcctccaatttcaaggctggcgggattcgtccaaatcgtagctgggaccagcgccgaccgtctttaccggcgacattgagtacctggggcggatccacacccaatctcgccgcgggatccatctcgaatccatcttcacagcggtccctaatcgacgaagttcgaattcagaccctcgtctctgacattctagctctgccgacggtgccaaatacgcgagagatactaatcgaatggatccgtcgaactcgccaccgacaactgatcgaagccaagggttggtgggtggcgatgagcggagaccttagggggttcgatttcgttgacgacaccctcaatcttgtcgagtccgattgcatggacaaacaccactttcacctgattcccgtttttgacctcgtccgacaggcctttctcctgccagaaaagtctgtgcaagttctccggaggacagaggccattcgccagggtgcgaacagggtgcaggaagatcggtctaggtatcgtcaaggcaaaccggtaccaaaacaagccccggtgcaagaacccgtcaaggcgaccgttgtcgccatcgagagaccgatagaattgacaagcgggaccgctctacagctcgtcaccgacacgttccctctggcgggagccggccgatctcctccagccgagtccgctggtgggcagtcggttgggccttgcggcaccttagatcgccctacgtcagacgaagacgattccgaggagctcgatcagcctggtaccgatcagtcggagccaagcacggcggtgcacgagacgttcgttacacccaacacggtcaacgagatgaaactgggcgctgcctttccgagccctcttgaaccgtctcatcacgccgctcgccatcgcaagggaatgagcaaaatgtctgcgttctcgtccgagacggcgctcgagatggcttccatctttgccactcgagattcggcgtcccgctcgtctcatcgctcgctggcttctcccgagccggaacctgagccgattcctaaattgtcgccattgccggaagagtcgccacgaccactttccgacaacgatcccctcgccatagcatactcgccctctcagagtagactgcgcagtattccgctatccgacgaggtctattcagacggcgagaacaacgtaaggatctcgttcgagggaggggacggagacatttcgccttttcccaaggtaacgtctcctcctcgacccattccagaccggactaccagtctccaacagggtgtcccgacatcaaggtctaaagtcgcagatggtccggctgccgggtcaatcctcaagcgcacgccgcaagccacgccagacccgaaccgcttcctgttgacgatgccgtccaccttgtctcaagtgctgaatcttttcgagcctggcactactcgactcgctcctggtctaagtccaggtatgctcgagatcgagctcctccgaattatcgaggcggagcgccagaaaatctctttacaggggcaaacctggagtcgccaagaaaccagccgagcagcttggctgctagaggagatcaggttgacggtaagttcggctggtcaaagatacgtcgaccgccgaaaactcatcctcgtcatatattgcagttggaccttggccacattgaccatgtctttgatcgagtccgaagttccctggtatctcattgctcggaatccaaccgcagtaccgaccacttgccctcgatcggtcagtcccgagacggcagtcaaggggatctgacgccttcagatcgcgcttcccaggccccacgacccatgagtacgctgatctcgcagcttggcgaggaaaaggcagctctgtcgcctgggcaattaaggttggtcactcccactggtcctgtcacggtccctatcgaacaggtcggggggcgggggatcgcattcgaccctcgaaggcccgtcatccgatccacccactctttccacgatgccttgcccgggatcaggtccggcgagtcggtacagcttcgccaacgcgatcagacctcgagcgaaactcgacaatctcgccgggtctcgtttgcagggtacgattcccgtacgcctaccccgccagaggccaacatcacgagcgagcattcttccattatagcggatcccgtgatctcatctaacaccatgtggcagcatgacaccaaggatgctccaccaccgtatcatccggctcacaaaagagcgagatcgggcagcccgtgacgcgatgtttaggccgaacttcttgcgcaaacgatcgatatgacgaccgatcttgctacgaatgactgaccgatggaaacaggtttgaacttacgacgcagagactatacacgatacgcctgatagctggccaatgcgggtcatatgtaaatacgttgtaacgataagcatgataccatatgtaaactcgagcatatgttacgaacgatcggctctaaacgaggagagttagctcgcgaccaaaagcaggtcaaccccgtattcacgatagttcatggtactcctttcgaccaacctatattccgtgccatatattgtcaacgtttgtgacactctggtcgccttcagaatggttcggcggatacagggctgggatccagtgctcatcatcagtcaggtgagaatcgtaccgactttgccagagtgatcagacagctcgagttgaccgacgtgtatacgccccagatcatttcgctacaaacgctacattacctcttgttgaccctcgttatacctcccttggtcaccttgttcaccgatgggagtgctctgacgtatgcaggaggatcttacaacaagggatacgtgctagactggcgggagattgcgagtcgaacgacggcaaagagtctacctcgtgaaccgccgaccgtggagaagcgggtcctcacgaccgccgtctggggggagacagactcgagagctgaggatatggagtctttggacttgatagcgaaggaatcggccgatgtacacacctacatccgtcggtcgctctcgaaacgggaaaacgagcactacgccgtcaaggatgaaaaggatgacgatttcgaagtatgggactatggtgtcagtcggcggcgaggttgggttttggccgggacgtggctcttggtctgcacgttcgagtaagtctcgatcggtctcccagttgcaacttgactagacctgtcctgtccccctcgatcagtatcatcccactgtactacctcgtccggaaacccacccatattctcgacttttccctcaccctcctcttcaaccacgtcgccatctcgacgtatagcacgggtgcattccccacgagcctgtttttctgggcggtcatgttgatcggggccatcatcatggtcgtaggggccgagcaggtacgttcatgagcggggtgggctcgtcgtccatggagaaacacgtcactgaacacgaacatgtacgacgactcaaccctatagctctgtgtcaagagggagatgagtgaaggactcggggctcaatcgttcgagcaaggagaacgtgatccgttacaggccgaagagtttgagctggacgagcggtaatcgaggaggttccggctgtcggatttgtatacaggccagactcggtacggccgaaccctatgcatacgtttctacgatcgggtcttgcagggtcaaggtctcgagtaggatcgggcgagggaggccgttcatgtctttattgccttgcagtaccggactgccgacttgcctgaagacgagtctgccatcaagcgtaagcgacggagcgaccttgtctcgcaggtcataagcgttgggataaaacctcggctagcggtcaagatcgcgagccggacccacgcagaggtctctccagggtcacaacaagatgccaagacctcggattatgcgtaatttgataatgaatgtgtgcgtatgcatgtgcgcatgttcgcggtagtcaccatgacgggatgccgagtaaaaggcgaaccggagcgtcttgtccgcccagaacactcctcataggcgaagcagaaaagaacaagaagaaggaggaaaaaacccaaaaaaaagcaaaacccgtagcgaccctcccccggcgactaggttcaggtcaactttctgatcccttcttccctctgatcctccaacaccctagcatccacccgtcctaacccctgcgcggtggatcgctcgagcatgagttgccaccaggggaagaggaggtggttgcagatcaatttgaaccacggtgtgaagaggttgactgtggggtcgttgtgtcgtccgagcaagacggatgaatgggagaacagaggatcagcatgcaagacggcaaccaacgaccgcgggccaacaggtagcgggcatacgggactgacctttatcctcgaacatttgcctcaactcggactctgtcacgtacctcgcgtcgctcacctcgttcgggttgaggtcgagcgagacgtctttcgtcgcaaacaggatgtagtcgactggcatgtcaacgcggtagagtcaaggagaaggaggaggcgaatgttccagtcagccaaaagagaacggtgccaaggcatcggcgaggaaacacgctcgacggcctctcctcaccttcgtgttccccccaaatcccattctcgtcatcttcatcacaaggtgccaggtagtgaatcttggtcaagtacgtgaaatcctcggggacgagcgcatcctcgggtacccccagctcgtgtggcaatttcctgatagcagctcgtcgaacacccatctccccaacttcatcgacctcgctcttgatgctcaacgggtgggaacaacaggtgttggtccacatggacgggaaggtgatcttctcgtcggcgcgtttttggaggaggagcgcgccgtcactagggcggaagaggaagacggaaaaggctcgatggaggagtccttgacggatgtttgacatgaggtggcctgtgggtcggggtcgggttgagggtcgagggtcgaggttggggtcattttccacgatcagatatcatgtgatcaacgacagggcccccggactgtacaccaccttccgactcacatcgcttcttgctaccttcaccgtacgccttgtcttgatcatctacgaggatacacctctcttccatcaacctgacctgttcctcgtcgtaagcctcgaggtcgacctgtgcctctgcgggttcggtcgaggtgaggtcggtggcggtggtggccgaagcgtcggcatgtccggtcggtgagacgggagtctgtgggtccataacggtggccatcgtgagtcgatgcagagtatttaacgagtgtgaatgtatgtacagcgtggcagatgtgttagttatgggggctggtcgatgcaatacatgtatacctttgacgactcgaattgtttggttccccaagttgcaagttgttgttggggtcgactcgaagtatcaggtcaaaaattggaacgataggggtcatacagtgtagcatatagacatgacatggatggctggtgtatagactatcacaggactctaccaagaagctgataagccaagaaggtagtcggtcaagatgtctggtccgacagagaggaaaaaagtaggtccatactccgcaacgacacgctcaatcgaacgacccaaactcatcgtgtcaaaccacttctcagggcattcaaatccatagaggtatcgtctacggctcacacgcccgactcctcaccgccgaagaagcaaagttggcaaccccgggacatacgcatcgatggaccgtctttcttcaatctgctacgaccccgccgccaacgttcaagacgacgtcgtcgtcgacgtcgacgggtacgggcggggtgggaaagggcaaaggcaagggcaagaccacccccaagctggaagaggacgcaaggaacgacttagaggtccaggatgagaatgacgatttcatcacggggggagcggacgatctgagctggttgatcaagagggtcacgttcaggttgcacgagacgtatccctcgcccaacagacgtgagtgtcgagacgtcgagcagcgagacccgtacacaatttgagcttttcctcactcccaccccacccccaccccgatcctcagcggtggataaaccgccataccgaatcaccgaaaccggctggggtgaattcccactcaacatccgcgtccagtttcaacaagagacgggcgaaaagacgatcgggtttgcccatcagttgaggttgcatcattggggaccgcccgctgtcggacctttacagcagcagcagcaacaaggacagggacaaggacaagggcaaggggataatgacgcaggcgtcgggccaggggtggatgggtccatggagagcaagggggagcaggtgggagggacgatgtcccaagcgggagaggctctagggaattctcgagcagggactccagctgcggggcaagtctcgacgccgaaatccgggatacaagggtcggtcggggacgccgacgtcgatgctgagggtgaggaagaggatgtcggggtccctacccccggtggagccggtgtgcccgacctggggaattctaatgcgaatgcgaactcgaatgcggatgacgggcaagacgttcagatgaaggacgtcgacgaggtcaaacctgaacccatggacagcgcggacgatggacaattggcagtcgtctcggaacccatgaccgggatcgagaacgacgggggcacgaatgacgatccgcaagaaggaggaccgatgacgggttcttccaccagctcgggaccacccacgatcaacccccttcccgtgcattcgtggcagtacgatcagtttgtctttaccgacccgacgacgacgctgtatcaactcttgctcgcacaccccgagactcccttgccgcgcaggtctatacgcaaggggcaggatcccggtcgaggtgccatcctaggcgtcgatcgcgggagcgcaggggtcccgctcgagttcacagaagaactcgaattggccgaaagagagaggttggagaacgcgaggaggtcgttggtggaagagacggatcgatggaggtgagtcggctgtcgtccaggctctcttgaacggatgttcggatcgagtagagcgctgatcgagcgaattccccaggcaacggttgatagagctcgagagcgaggcgcagcggttgaaggatcagatcgccgccgtctgatcgggaggatgaggcgttgggcgaagttttctctttctttttacgaactattaacgaccatgcagagtacggaatgacacaaataatgaagcgatctccggcatggctccagctggacaggtcgaacacgaggtcgagatcgagcaccaggcagtttcgacgtttcctctattgaaagcgcgttcgatctgtcgtcggtcttggtctttttcagtggcctgttcagtgtgatacatctttgcatgaagctcacttcctctgcctaatgccgagctactcgctgtccaagctatgattgccactgtgacttcgcatgatttttccatttcaacatttttgaatatgcgcaaatcaaggtttcgcgcgaaagttaccgttaggatgaccagaagtgacaagagcaagatatggtcaagtcacaaaacttggggacaatcgatacttgcaatgtcttagaaccctcacgccttatagtaaccatggtagaaatagcaagaccacgcaaggtagctccgctaccaccggctggtacgaccgtccgtcgagcttcgcacctcgtcctcacatgactaacctctttcgaaccgtctccccccttgctagaccgcccgtacatctgcctcggtctggaaggctctgccaacaagtttggagccgggatcatctcccattccctcggacccaatggatccaccgccgacgtcgtcaaggtcctgtccaacgtccgacacacgtacgtgaccccgcccggtcaagggttcttgcctgcggataccgcgagacatcatcaacagtgggctttgaccatcatccgaaagtcggtagaggatgccgggatcgatatgcaggatgtcgacgtggtggcctataccaaaggtgagtgtgcatgggaagaggccgcccgaccaccagtttctgacagtgggcggtggatcgacgcaatgtgctgctgctgtaggtcccggtatgggtggacctttgcagtcggtcgccctagtagcacggaccatcagtatgttgtacgatatccctctggtcggagtcaaccactgtgtcggccgtgagtaccgatctggatcatgttcgaccccctcacgacgcctgatctcaaacgtacacactgtttgcagacatcgagatgggcagacatatcaccaactctcacaaccccatcatcctttacgtctccgggggcaacacccaggtcatcgcgtattcacagcagaaatacaggatctttggcgagacgttggatatcgccgtgggaaactgtttggaccggttcgccagggtggtcggactcccgaatgatcctgcaccgggctataacatcgagcagagcgccaagaggtgagtgccgggtcgtgcgtggtcgttcggtgacagagaggactaatcgagtgctcgtcgccaccaggggaacccgattgctaccactcccttatgcgaccaaggggatggacatttccctcaccggactcctctcggcgaccgaaggctatacgcatgataaacgcttcatcggtcccatcaccgacaaggccccggaagagcagacgagcgacggtgacgacgtgatcaccacggaagatttgtgtttcacgttgcaagagacggcgttcgccatgttggtcgagatcacagagagggcgatggcacacgtcggcagcgcggacgtcttgatcgtcggtggagtaggatgtgagtgtcctgtcgccaccgggtcgcccatcgcacgtcgctaggaccgtacagctgatcctcgatcggcgtggttaacggacgatcaggcaatgaacggttacagcagatgatggggatcatggcctctgaacgaggaggtcgagtgtttgcgacggacgagaggtgagcattctacgagcccgttatccgggtcatcctaaccggtgacgaacatccggcagtttctgtatcgacaacgggatcatgatcgcccaggccggattgctggcttacaggatgggacagaggacaccgatcgagaagagtacggtcacgcagaggtgagtctcgacccggctggtaaaaggagaacggaacggggcggctgatggggcattcgacgtcgacaggtaccggacagacgctgtacatgtaacatggagagcttgaagtggtagtgtgccacgtataataatgataatgatataggaggatttcgccggctcgcgaggtcgttacggggaacattgtgcgttcgtcatagaggtcgtcatccgaaccttttacacccagacccagattactcgccagaccattcagcgatcatgcccatgatccctgcaaacctctccctctccttctcggaatcgccagcagaaagatcgtcgtcgtcgtcgtcgtcgtcgtcgtcctctccagtccggtccgccttgacgggcttcgtcctgctcaacgccagactgacgacgacgggtctccgttgcccagccgtcccagctctccttcccggcaaattcgggttctcgcccaaccaccagacgagcgtggcgatctgcgagatgtacagctcgtccctcgtctggtccgatggatctcgaggggtaccgagtagtggggtgaggaggatggaagggtgcggtggaggtagcataggcaggatttgagtgagagttgaggaagagctgggaggccgggttgggtccgttgggggttgtttggtagggttcaagaggggcaagaggggagatagggtcgcttgagtctagtcattgacatgccgcatatcgtcgatgatcagcaaagtcgtaaaacaagcatattgaccaaatgaagcaggacatcggtgcacactcacgaggaatcccatcttgcccacctgagtgatcatgacaaacacccgatcttcataactctgtatcaagaggtccgtctgtactccatccaacgtccgagtcaaagtgtaggtcgggatgggaaacgatgaggagtcggacagcggggtgatcgtcgctggggtcgggtcggtatgaagttgacgtgcgttcaggctcatcgtggccgcttttcgggagatcgtttcgagggacattgtcaggtttctcttcctggtgatcagcttgcagctcgaagtggtgatgctggttgatgtcctgaatactggttgattgagggttcaaagatagatttccttgtcaatcaacgtcctacccgtctcttctggctcggtcaagcccggtaaagttgctgacaaccgaaagtcgaacgagatactttgaatggaaacttgggtcaatataccccttcgagttacacctctacacccctaccatcacatcagagcaagctcaaggtagacctggagattgaatagcatcgagttggtctggctttgacgacaacttaacccgtcgcatccggatcgaaacgacgacgggcatcgcttcacatagacgccgcatttcgagtcaagagaggtcgaacgagataagtaacgatttggatagacgacaaacgggtcagcatcttaggacacagctcggaccggacgagtgacacaagttcggtattggggaatcaggttcctctggtggcggtcgacgtgagtctcggatgtacacctgcgacgacgttatctcgagaacaccgctcaggctcgggtcctcaaacgttcgctcttcctgtctcgtccttcacctgcaaattagatccacactggagtcactcgggagatggactttggagctccgtcgtgaacacactcgactgaataggacgtgaatctcggagagagatcatcacctccatctcggctcgaggtcaaagggaacccatgtacgtctcgtcgatgcccttgctcagcatattcctagacctagaggtctgaatcgaccctcataccacagcttcacggatcatcgaacattcacacgtcaatctcaaccgataccttacccagggcaagatgacctcgagcgctcacgccccgatcgttctcatccccccaccgcatcccggatcgatgtataccctcctgctcgacccgcctcttcctcgattcatcgcatgggtaagcgttcgcctcgaccgagaactactagtcatttggaatgatcgctgatgatctggaaccgcatggtcttcgtattcgtcttcgtcgtggagggtaggtaccggttctctgtagagggttggccatcttcatcgcggtccccttcgtcatcatcatcttgctcgatatcgtcgcctaccgtgagcaccccgagtcgaccactccccccagaaaatagactcacacctccaatgactgatcctgctgaatccgacccgcatgcaatcgactcgacgtcctacgccctcgcccaaacgtacacatagtcatcgcgaggacactccacctccgaccgctcatcatgcgtgtcccccgatctccacccacggggagcactcatttgaataacatcaagacgaacgcatccccagcggctctcagcgagttgttgcccaatgtctcggagggagaatcgtcccccctcgtcgtcgccaacaaggcattggatcagggaatgggaggagctttgggattggggttgggcaaggaggtcaaggggcgtggcagcgcgggatgggaagtggatgtcgaggatgaagaggaaacgacgaatatcttgctaagaccgccgactccgatcgaggtcgaacgggaaacggaggacgacgatggaccggtcgaacccggacacgaatcgacggcggaatctcgagagactgttttcctcggcgcaacaatcctctccccgagggagatcgtctcgcccaccccgacgttgatcgacgagttggacacggacgctaggtacggaatcgacgccctcggggatgaagtcgaggtcgacaagtcgcacaggacggacgatctggcggatgacgctctagctggttggacaggcgccaaaccgcccgtggtccatcttgatcgacatgagtcctcctcatccgaccggcacgacgtccacgtcgacgagcagcagcgagattctcaagatgacattgaaggggacaaacgtggtctcgagcctgtcaagggtgaaggtagactaggagaaccggcggtacacctaggggaatgggaaccgaccgatttctcagcgcaattcaagactacggaggagagcaacaagacggaccaggcgttgaaggacctgggtgacaagttggccgccgaagaagacgggattgctgatcgggagatgcgagtggacggggacgaggtcgagctggatttgacgatggacgagctgcgcgtaagcctcgtgacgtcgagcgcggtagatggattcggtttgaccgttcgtttcataggacctattacggagagctcaagagtacaaattggagggcaatagtctgtttcaaggcgccgagccggatctggacggcgcgatcgggtcgtacaaggccgcgttgaacctcttgccagtgatgtccttgacgcttgagcccgaacccctgccggcgacaaaggactctcgtaaactagcggatgacgagatcccagaacagtcgggcgtcatggagctgacggacgaccaagcggaagctatcaaacgggcggatgaggcgagagaggccgaggccaagaggaaggaagcagaggagaacaacccagagatcaagtcgagacgcgacgtcgagagggaaatcgatgagacgaaaaaggccgtatggggaaacttgggcgccgtttgggtgaaaaagggggatgacaaggaggcagtggcagcgtgcacagaaggtgagttaccgagccgtgcgtccgggtggctgttcgtgctgacatcccctgctctgccgcttggaaagctttaaaactcgatccgagctacgtcaaggtcttgcagcgtcgcgcgttggccggtgtgaggatcgattcgtggtccagtctgaccaccgcacaagaaggtgaacttcggtccgattcttgtcgctgggtcgtgcttctctaggctgatctgcaaataatcccggcgttccagattacaccaccctgacccggatcatgccagactcgtcccccatcaatcaacaagcacgacgtgcattgtcgttccttccggaccgcatccgaacgcagcaagaaaaagaaaaggacgagatgctctccaaactcaaagatctcggcgacggactactcggacgattcggacttagcaccaacaatttcaaatttgacaagcaagaaggcgggggatacagtatgcgtttcgagcggtagtcgtgaactgctacaatcatggatttttgagatgtgcccctgcgatctgaacaggggggcgatgtgatgatcttcgatgatgacgcggttcgcaatacaagcgacacggaccgcacaaaagtgtgttatttaagccaaacgaacaatttgatagaatgtatcatatgtagccaccaaattcgtcgttacgtatctcctaaatgacaaacagaaatgcgaaagcttccgagacttctatagggattttcacacttgtctagacgacttggtccttactgtagcccttcataccggcactcgacttggcgccatcttcgacctcagcttcatcctgatccatcgcattgtgtctatcatcgagcacgtagtcctcgctaaagaacgccgcgacaagaggcacgaaggtcagaggaagggcgatgatgcagagtcgtttgtaggccagattataagcctcgcggactccaggcgctgggtcgatcccttcgagacgggccgcatagatgtcacccgcgaccgtcgcgatactgaccgggtcaagctgagtggtctgacccagataatcgagcaagcggtacggccagatggctcccgagatggacgccccgatgctacctccgatcgaactccatagtgacaagacggcgatggagataccgaggtccttgtgtttgaccgaagcgtggacggcaacggtagacgcgatgatcgaccaagcgttcccgacagtgatcaagaatttcccgaagaacaggcacgctgtactcgtgtgacccaaagacgagtgataggtgattcctgctccaagacatcgcaggcatagcgcaacgacctggagatatttgtatcgatgggtgtaacgctgaatgagacctccgacgatcgagaacgagcacaaggtcaccgtttcgatctgcgtcatgtacgtataattgcgcgtgttgtagtcttggatcgcccagacccagctgttccagtacgtgttgtgaaccatcgagacggtaaagttgacaaagttgatgaagatgctgatgagaaaggtcttattccacatgctgcgcggcatgatggggcacgaggccaagaaccactcccaggcacagaataccgggaggagacagccgccgatgacaatcatggcgatcatcgaagggttcttccatccattatccgcaccgtaaaccagagtagggggactgagaagtagcgcaaaggtcgtgccaagtagaagcaaaccaaaggcgtcgatgacttgaaagaatcggatgacgcggcggaagagaggaaggcggaccggaagaggggtgtcaacctcgtcgcccgcggtggcattggctttgagtagccctggtggcatcgaatcgctccgtaagaaccaggtgcgggcatctttcgcgaagaccatacggctcacctcgggtcctgtgttccgcccagaaaatggcaatcaatataggtgtcaagcaaacaggcagaatgatacagaacattccgtacttcagtcaagatggatcgaaagtcaatctcacgcccctgggtattgccagcacagtatcaggactcacgccccatcgccaattcgtcagcccgaccgaggtcgtgatatcgccggtcacaaacgccaatggtacatagaccaacgaaatcccgccgaggacgaggccccggtattgcaagctggtaatatccgagacgatcaacgtttgcagaaaggccagccccgaattgcctgcacgttgcgttgagatgaaagtcagcaaagaccacgtgatctagaccaggacgagtagctcaccgatcgtatagatgacttgacccgcggcaaaggtctcgacgttgggtgcacctgcgctacatgcgtacccgatggcgtacagcaggacgctagccaggagacaccacgaacgtgcgctgaggtcggccagtttggcccaaaaggggatgatcacgcccgtcatgatagaacacagtagagcgatggttgacagtagcgagttggacgtaaaggacgaggtggcgaacgcgaggtctgacccaggccaagatgtcaaggtcagtcgtttttttcttgcttgcgtgctcgagttgatcaaagacacttgcagacaaaagttgtatcgacactgagcgcgatagcaaatgcccagaagcccatggcgatccagaacaaccagacgagcttcttggaggaatacacttggcggaaggcagagatttcgattcctccgacggccagtgggtcgttgattgaggggacgttgctgccggcgttgctctggacggtaaaatgataaccagaggtggcagtctcggccccgatatccttatcatgcgaggcatcactcttgctaggttgatcaagcatggtagaggatgcgatgaccatgataacgtgtttcaagtacccttgttccgacgtaaggaaatcgttgactttgcgaagacccgactcggttcggagagagcaagaaagcattccaaggaaggcactaaacgaaacgacatcacactgtccttcatatataccaattactccgacaacaggcccatcagcttcaaagggatcggaacaggtcttctcggttatggcccgtccaatagcagatatcggtcaacgactttcgactcgatccatccgagacgagcgattttattcccgcgcgcagggctgaaacagcgcgcgtgaggggaaagatcgagtcattttagccagatcgatcgatcacgcgtcgaggcgatgggtgtagtgtggggtgtatatgtactcatacgaagtgtatagaatagaggctacgtttgaatgtgttctgggcactcgttcaaggattgcgaagagatgaccgtgatcgtcgactgctcgagtctcctctaccccgaggacccctggctagcagatatggcattcattacgtgatttcagacagatcttgtcggtcagtcgttgcaaagccaaagtcacagaatagatcgttcaccgctattgtacttgctcacatggctctcgacacggggggattcgaggtattctgatgacaacatttccggaacgcgatcacgcaagcgcttttcgcgtcgtatgagaactcgcctgtaggctaccgccgatcaccccgcgtcacggcgtgcatgtatagatccgtaataattgatggccgttcgagtacaagctggtggtccttggttgattcgactctgtatgccatatcgatatcgggtcgaggcgcatttcccccagtttcggccgccgagttttgtgcggaagcaaattgtagaaaccctgaacatcccatgaacattcctagctggacctcgatgactacacaattgttcacttctacaactagtgtcattcctttctgtacgattgagcacacagtgggcacccacacacatcttccgcctacctcgaggtgtaccaagcaacgattcagtctacccagatacggttgcgagccatcgcagtcaaagggtgatcttcacggccgacgtaaagacacgctcgctaccactctctcccgccccgcagctgcgttgtcagaaatcgagcatgctcttccacatttcggctttcagtatcatcgtcgcactcgtgttcggtgagtaccagccgatatgagcttggaaggtcacatcagtatcgctgggcaactgatatcgaacatcgcccttcgttacgactacccttcatgcccccgcagtcatcgtctacaaacgagctcgcgtcatcccctttatcgcaccctacctccctacccggatggcgacctacatttcgggctaccagcccctccagtcgttctcgttcgccgatcaggccgcagcgggcatgaccagcgggagtttcgacgtcgagggtcagaacgtggccagtggaagtggagagggcagggtcggactcgatgccgagggtgtcgaagaggtcagaaggatcatgtgagtcggacgttgtctttgggaggcgaggtttccacttggctttcctggccattgttgatcgtccttttgtttctgctgaacgacagggccgtcaatcgatgtacgttcgaccaggcacgtctgatccgtcacaaccagatcttggcagccaacggaattgcgccggatggtaagccctagtcctggctcgacccagcttggtaggagctaaccggtacgagtgcattcccttttacttcgggtcttactactgtggtcgcgtatgcaggaacccccctggtacgctcaagtccttggtgctcatcgacgtttgcgacccgtcactgacctgatatccggctctatgattcttcccgcaccgcaggactcgaaagccatcactcggctatgatcctaggcccaacgctagcctgtctcaaggacgtacgtgtaggagagcgtctcaccgtcgacaaccatgcctcccttctactggcggtcaggtctatcgacttgaacctccgccctgtatctcttcctctcaactcgtttgtttctcgtcgtttttgtatggcagctcttgttcatggtagatataatcacagtctcgatagcacagcgaaatcaggtcgggttgccggcacgggtcaagaggtaggaataggtcgacaaacccaaattaccacatgtgaacggcggaaatgaggcagtgtcaagatgggagtagagtcacgaggcatgtcaatccattttcatgcccatcctgtacctttaccttgtctacttgcacatttttgccctacactggttacaacgaatctgatgtaccggcggggtgattatgggggacatcatctatctctatatcatcgtccacttggaaacgacctttctaggctttgggcttcttctcctccgacttgcccttgcccttgccgtttccgttatccttggcgttgccgccacctcgctcggtggatccgagacccaagaccttggccatgtggaagaaaatgtccgtgttctccatgaccccacggaagacggcgacggcctcgggcttccccttggtgaagatgggaacgtcctggagcgagtgaataccctgggtctggtcggccgggatggtaccgttggtcaagaaaccgtcgggcttgtcggccgggttggcgtaggcggtcccgttgacggagatggcagggagacgaggaccgttcttggcgaccgagtaggattcctggacatcggggtgagcaccgaatccggcagcgatggtgtatcgggggtcccactggacggggaagttgggtccctctacagcagtgcaagcgtgtcagccatcgggtcgactcgagctcgtcccctcgtgatcgcctggcactcacgttctccaaagacgatgctctggttgttgggctgggaacccttggcgacctggtactcggaatgacccgactgctcgtagataccgacggcgcttcgcttggccctgctaccctgctgagcgctcatgtacttggtgtcggacgatccaaagacgtcgaatccgtgcgcgtggtccgcagtcacgatgatcaaggtctcgtcgagctcgccaatcttctccaagtgctcaatggtctgtcggaccgtgtcgtcgagctccaagagttcaccgagcgctcggtcatagtccatggcgtggaacatcttgtcgatcgaggcggcctcgctcatgagcaagaaacccttgtcacccgatcgagcgtgcaagacgtcgatggccttcaaggtcatttcggcgagtccgggctggttgatggcggtgccgttgccgaggggagacttggtgatgttgggcaagttctgggggaatacttctcggtcgagccactacggtgtcggtgcgggggtctcggtcagctcgggtcgggagcgtcaagtgtggggaacaattcactcaccttggccatgttggattgagaaaagacacccagagtcctctggctggcatcagcggcagcgagctggtccttgtcattaacgacttggtatcctgcctgcctgaaggcctcgtaatagtccttcttgccaggggaacccgaaccggcgatccattgttcggcaccacctccgaagagaacatcggggccggaccattcagtccagccagagtagttgccagtgacacccttgaggaattgttcggtgataggcgcgtattggcctcgctaaaagcagagcgggttggtaagcctgagaagctggcaccatcgcatctccagccggtactcacgtctcgggtgtgagcgaccaacgaggcaggagtagcatcggccaaaaaggcggtcgaaacgataccgaccttgccgcctcgctgacggtggaagactatgatgaccaacgaggtgtcagtgcctcaaacgggatggaaagcgcgcgcgggggatgggactcacgttctccaatggtctcgaccttgggatcgtcaaaggcgtcgggcgacgagtccttgtacactccgagagcgttgacagtggtcttgtgcccggtcatgatggcggtcgccgagttggcagagtcggtgatgaaactgcgaggtttcaacgttgcagcagtcagtaacatggcgagacgagtgggatgtctagcgcgcggtagccttacgagtccatcgagtgggtcatctgaagaccgactccgtccatcttgtccaattgcatctatcgaacgggtcatccatcaaagtcagctctagtgtcttacagctgcctgcgtaatttgcgcagagcatcatcggcttaccgtagtctggtactttccgttgatctgcttgtgagcgagcaacctggccgcggtgatctgccgagcgacccaagcgatcagctcccgaatcgctcccgtcgtcgacctcaaactacccccgcccgtctcgaactcacggccgattggggcatcccatctccgatgaacaggatgacgttcttgacgatggggtggtcacaaggctctcgtacggtccatcgggcgacggtctcttggtcccagtacttgagggtcgcggtgtactcgccaggctccgagagggagagcgatcggtaagccttggacgcgacgttgacggcagaaggcgtcttggcatcctgagcgaacaagtcctcgaaccaggtaaagttccacttttcgatcgaggcttcaggggtctggaagaagtcggtgacgacggcagagtaacccttgttgttcgagatggtcagcgaaaagttttcgtcggggacgccgttgttgaaagcttcggatccgttgacgggagcgtggacctcgagtcggatgtcgaacttggcaccggcgaggaattcggcttgatcaggagggaagacgcatccgagggtaggacaaccgcctgcgtgcgtgcaaagaggtcgagtcagcgccgggattaggaggcgtgatggtctacgatcgacgagtactgacctagacgttgatacgtctgagcgatggccggtgcggcgaccgaagagagggcggcgagggcgaggtaggtggatcgcatcgcgcgagagagtcgaggtgttggtcgagggtgattgatgagtacggtcgtcgggttatggagagaggacttgcaaggtattcctgcccagcatatgcttatataacattcccttcgtctttgttcaacgacttttcctgtttgattgtaaacacaacgatgtgatcgcacgtttctgatcgcaacagcgagcgaggtcgggggtccatgcgatacgagattctctaccagctacccgtcgaaattgcctcaaccagagtttctagcgcgctaacggagaaacgcgaacggaacggaaacaaggcaccaaccacccatacacctgtaccccagtgtgtcgcctctgtaatgacctcgattcatttcggaggctcggaaaggatgactcggtagatcatactcttcgtcagactttgcatgccagacagtagcatgaatcggctctgcctgctcttgtcaagacctcgcagatgttgaactcatcgctgaaccgacaccaacgccccccgtacgttgcgtggctccacctcgtgtcgcccattgtcccggtagttgctcctcgagaacacacgttcaatcccgccaagatccgtttccatcgccggaagttgtttactccttctcgccaggcgtcggaagattcgtgcttgttgacaatgtccggggggaatggagtcgagccacgtttagcttccggtccatagccggcgtgcgactcgagcgcgacattccggtacgcgtcgcccaccatgccggcatcaacgaaccggaagtaaaagacatccatcgcaacaacgttcgttcggaccatgcaatccatcgttcttgttcgaactgtgatccgccccaggtcgtcctcgtcgtcgttgccctcgggccgatccacaccgacgcaagcacacgataacgcaaacatcggccactttccgagaagacgcaaagacagaaattgacggaacgcgctaggtcactcggtgaaaacatgaagttgtagtaatatggtggctatccaacgcacaagtctttctcctctctcgcagcgcgtcttggagagccgggccacaaaacaagaggtaggcgatatacatcaatcaagatgctcaattaatgctgctgcttcatcatgccttgagacaaacgcgcgatcaaacaagcgagatgcggctggctagttcgactggattcaatgtcggtggacgtgagcccgatcagacctgactgatagagtccatcgtacgaccttcctcccacatggtcttgccgctacatgcgcagattctaggtcggagaaaaggtcgtcgtgagccaaatcgtctcgacgcgaatgacacagttcacactcacgtcttgtcgttcccccatactaccaggtcaacagacgagcatcttcagggtcagctcgagtccgcttcgatcgtttagcaggcgagactcacccccactcgacctggcaatcaccccggccaagatccccaacctccctttccccccaatgaccgccttgacccgctcttccactttacccagtcgaccatcctccagcgcccgaagccgttcatgcaactcccgcgtacgttcgaggatcatcccccggccgacgagttgccagacagggataggtagctccaggaaggcatcggcgtatccttccgaatcggggtgtagcgtcgtcaacgtatgtaagggcgtcgagatcgagtagggcggagtgtggaggttggtcaggtcgcccgtcttgctcacgtacagcgtgtacgagtcgtcctctttcgtctccttcgatgttgttgttgaacccgatgtcgatgtcgaggctgtagcgagagggtagccggggaaacggatggtcaggtccaatagcgaaagcacggggctggaggagacttgaacgagacgagcgatgccgtggactttttgggtctcgagatcgctcgtcgttgggtgggcttcagagggaagaggtgattcgatgattgatacggcggcgccttcgtgttcccctgcgatgcgaaccggggtcgaatcatgtcaaggcgctggcctgtaaagacgaccgagatctgtgacctaccggatgtcgtgccagacccgcgaatcaggatctgacgtcccgtgtccttcaaagctctcgtgaccagggaagggggtgctacatagagacgatcaggagatcagttggcatcaaagacctgagtcttgacccgcgactgaccccgacccgtgacgacgacctgcttcttctcgaggttgatgtcgtaatcctcgaccccaggtacaccctgcaaagccttggtcacggccgacacgcacgatccgcaggtcatgtcgacggcaaactcggtctgcatcgtaaagcgagtgtgtgagcgagacgaagaagccagagagacaaggcaggcgggcatcctgggtactgaccttgaaagagaccgacgaggccgatgcgctcgtttgaggttgttcgttgaccatgatgtcaatggggggacagatagtttggaaattttgaaagcaagcctgttgctctgacgtcgaagatcgactaggtcgaaggctgtagagatagtgctaaatgtcgagcgaccttcttgaatatcatcggatgactcttcccttgatgtttagtcaccccctcgacatgatgacgagatgacgaatcacgtgattctccaagatcgaagcgatagatcacagttgggggagaaacgtcaaagtggcaaacaccacctcgagggttccaagtcgccatctttcggatcaaagggaatgaaacgtcaatgtgagtgggaagatcgcgggcataagtcggccttgctcttcctttgaccctcgtgacgagaccctacccaaaacgcaatatgtcctttaatccgagctcgtcgttgaattggttgaagcaaggcgaatttctcgtctgacaccttgagccacttaaacaaacagacgcagatcacgtgcttttgctatcatcaggatttgaggttcttgatctgtacgccttgtagcgagaagctaatccatgcgacatcaaaggtaatgcagctcatttgatgacacaagcgacacgtattggatggcaacttcggccgaatctagcccttctacaggaggttcagcccaaggtaaatccaataagcacgcaagttcactcaacgtctcattcaatataaaccatactataaatcatactataattaattcagcaaagactccgactttatcatgcgcgtcagacgtcttggctgagagacgacgacgcctttcgtgatgagcgagtgaaaagagcgatcaagatgtttttcaaacttcccctcgacggaactctgacgctttgtgcttctcctttatgtctgtcgcggttagtagggacactctcagcagatgacctttcctgaagaggttaaatagccagagctagcggaaggattgcaacagcccaacgcaccaaagagcaacgaatactactcgacacggttttgtcccccctcttccttgccatcaagattagtcctcaaaaatgtcctcccaaaattctgcatcccgaaactctgcttcccagaactctcaaccatcgacaaccattccccatggctcctttctcggaacctacacttacccaaccctcgatagtttcaacgtctactctggccccggtaccgccctggtcaacaccgtacgtaggactaaccgctactccgacctcgcgcagctgcaacctatggtccagacggctggcttggattcggaacttggaatgtctattgttgtatccaatacgcgaaggttaggcttcgtcgaagccgtcacggccagcgtcaacgacaccaaatttcccataactggggcagaagataacgcaccggtggaattggaatggggctcggaggaggctaatcccttgcggaaaaagatcacgcgcgctttgagatatgctataggctatcagggtgatgctctggagccgaaagtgacggcctctgactggcagtggacgagcaaatttgtcattgcaatctggttccaccgggcttggctacccatcggtccacccattccctgggaccttcctcctggaggccatgtaggcgtgcaggagtacctttctgcgctaagggagatttacttggcctggacccacagtggacaacaaccagtgttcacgcctacgattgaggatttgtagcctgttcttctcctatgaatcgttaccgaatgacgcacgaatcttgcccagcttgtccgtctcatgcctgttcttgtgctgaccctcagataactagccgagcggaagtgtgacagtagtgttatcggtctttcacgtcagcgaatgtacctctgccaactcgaatcgttgttcttccaagcacagtcggcgcttcaagtgcaagaattgcactgcatgctccatctttaagctctttccattgcttcaataatggatcattggtatcagggttatagctacgtctgcgaaacaggccaatccgatttatagtattaccctggccttggaaaactcacattacggtaacgaaggaccgtcaccttggccacggggaagcgggcaaagatacggtacgagttcagaatgtcctgctaaatcatgagcacggcaacgaaatgcatgaaagcgcttcaggaccacaggcaaaatgaccgaaaccagagttcagaggcccgcatgccaaccctctagcggcagccctgcacattaaagaaaagggcggatttcagaagacaaaatccggtccttgatcgcagacagcgcagccatttcctgtcaacgggttgcatttcgatgctatcttttgatctaggtgcttgaaattcgcttcaatggctcaatggcacacggacggtgaaatctgactgcatcttcaggcatggagcagcttctgtcaaattcaccttgcagatcggaaggctcgctgggacacaaacgttcgatagcggtggtcgaatcaagagactctagcgacatctcctatacatgagtccatgccgttacgcgttatgtgaagtcattgtcggacctgattggtcaaggcgacgaactcgaacgaccaagacacagtcggctggttccgtcatatcaggcgggtttcaggatgccgttctcggatacagtcgaacgtcaaatctcatccattatgtgtaccggcagcgcaactcgagcaagtcatcagacattttagtcgttcagaccgctagtaccatcgtgtgtgggcggtttggacacattagattgggaaagcgatgtcagaaccacctcgagggactaaaggcagtttgataggagctcgttggctgtgggatctatagaaagagactgatgcgcggctggcacatcgaaacggacaggtcgtcgacagtctgacgttgaatgtctcaaaagtttcatttcgctagaacagctcttatactagatctctccatgccaaaacatcgaagcatctagtcgagtaccagcttgactctgccaagtccggctgcgttgcgtgccgtgggagcaatgaatgctcgcgcattggtgagacgtgagaacgcgtggcaaaaccccttgttctgtcgccatcactaatctagcggctctgcgagtacaagagtcgcgagggaacgatatacgaggcgatgtttgaattcacgccggcttggagatactcaacgttcatgtcacaggtcctgtataaagtgaccaaccaatccagtccccctcatcgggatgacagggtatcgacagtaactacatcatcagaagcgagccaaggctcctcttacgcaactttctccgggcttgcttctgagtccaccacgactcgagaagtaacctacgccactcaggacatgagcaagccaagaagacttttattttagttgtgaaagacaagttttatggctcggaagagccgacgtccttgactgagaccttccaggagacactgagggacgcgtatacgaatcatttcttcaggggttcatggaaattgggcccgaaagacgagaagtttgaaccgatacagcgtttccccggccaaactgaacggcgggagatacttttacgctttagctgggctgtctaccacagctcccacctcatgaggtccgaaccacaggaggttctcgataggaactgtgtggtcgagacgagaaagtatgtgggatggttacatggtgacccgttcaaacggatcatatcgatcttgcatatactgtgctttggggttcaataagggatgaagattgttgcctggcgcgttcaagttcccgctagcttaggtctctgtatttcggttctctcgcgaggcagatcaacagaagccacagcggggggttgcttgattggattctatatcggatcggacgatgtcgattgaattccatgtggtcgttactggacgctcgcttatgtgattgatcgtcgagtaacttctggccctggacctgcccttcgatcaattcaaaatcgagcaaggaagacgtcgtggtgactgatgttgatgctttggtcgaaggtatgaagttctcatacgcaacagaggttagcagacaatgcagtttacacaagaaacccagatcgattcacgattacccacagttcgcatgcctcggcaagggctgagcatgagcaaagcacacatgccacagaaagaacaatgtcaaggataccttagggagctgcaaaccgtctactatcatgtgatcagcacataaatgggtgtataggcaattccgggcacccttacggcgagcggcccggtgatcgattggtctcattttgtacagtagatgaaacactttgacgctgttttgtatttttgagacccaatatccacaagtcgagccagctgtcaaggttttcgacgtgtaccattccctgcttattggtttcgaggcgcactccgagtgctccagagcgcgtcaagtcaaagaacaatcgaatatgtgcagcgatggctgatgatcggtctttcaacaggcattcatcacaatgcaggtcaactagatcaggcattggcgtgatcggatcgctgatgtgccgctccgtattcgtcagtcagattacgaggtagacaaaggagacgcttgtgtcatgtcaggggggtcaagtgtagtatgtgaaatggcgtcgagatttctctaggcgacgtatcacgccttcctcactgaaacaacgaatcacacccctcatatgacctcctttcatccgaattgcaggtgtcgacatcgtcaagcagtgattgactatcctagcgagaaagagataatgccgccctaggagcatctttgtagaatgtacagagcccggattctgggcgcggagtcatccacgagtgatccacatcatgcaggatatcagtcgatcttcttacctcgacactactgattcctcccaaaaagagactttcttcaccctagcagagacctgtcagtctctgatcgaggtcgatgggactagcacagtatttgtcgatggagatcccactactgacgaatggctagcggcaaagacagccgtggagaaacaaaccaatttagggacagcggcgaaagagaccgcatgagcatacctcgaacggaaaatcaaacgagaacgagagatccgagaaatccgagaagaagcccaacgagaaatcgaacgagaacaagaaatcgaacgatctcacttcgtagaccggataaggagcgatttgacatcacaaaccgatctaagtgcaaagagatggcgcccgtggttccgaatcagctttaagcccggtatacacggcgttctttggagggctctttgccaaatgagaggacttacagaacctttgccccccgacttgacacatcccattcaagaggcctgggccgagggcgtccgattgaagttgttcagatacgtacatgccatctggttagctagatcaggtataccgcttccttccataattgggagagcaggtactgatctgacagaggtgcagcggtacctcgattgtctaatggttgtatggaatgccgatttttgaccgtcacgcagcattgcaatgcacgatcgaattcatgctaccccgatcgcagctttggggccctatggccttgcttgaaaattgagaatcaccagagtcggtctcgcgggtcagttatagatctccccatcaatttggctggtgtatagttagacaagtcatacgatactgctcttctgatcgggagaagaacttcggatcagacttcggcgaatcttagcttcttcgcctctcttcggtcgatctggtaccctgaagagatccactcgaatctcagttgtggtcacgagacgactagcatctcgttatgttcgtcattcagatctacataatcaaagcaattgaagcgagaggcgaagaagtcctccacaaccgcgaaatttcctttcattcacgtccgaagaagcagcatacttagagatgagagtgtatgcgtcatttgatgtccacgtaaattgtctcctcgatcaataggcacatcgtaaagagagggcgcgaattattaagtgacatggtcacgaggatccctgcgactgatacttgggtaggaagcggtgtcttcccttgtagaatgaaatgggtctgagttggaagtaatgctatcgaccgccgcattggcaagcagtgtagatctttgcaggcaagaaaatatataaattcgcagaagagagtccagaatgatacgagatgtaaaggtcagatgtgccgtctcgattgagaatgtcgacgatttgatcacgcattacaacaccaatgcagaaactcagaaaatttggtgagtcccgactcggattgacgtcccgtatcgtcaacaacgctgattacatccacatacagggaaacaatttttcagtagcaaggcatcttcgaacacgttgacgctcgacatcgaggaaccgtccgacgaaacttccacgcaagtcgacttgaccttttccgagcatagtttcggcagcaaatctttagaactggtggtcgtctttactaccacgagagggagcgatttgcagccagatgctctggaccaactagagcgaacaatgagagaagattctatcgccagtcaagttaagggcggcaagtggaacgctgaacggaaggcagtcgcccaatcgcatctggaagcagtgacgtggttcaacgaggtgtggccggagaacagagttgcactggcaaagacaggttgggaacccggaaatctaagcaaggcaaggttgatcgacattatgcaccgatacagcatcaatgccaaaggtgactggaaccccgaccatcgagcactcgcttatatcttcgacaaggccgaaaagcatcgcgaaaacgtcgctgatatcagacctttccgattgaatcaatgggtgcacaggtaccaggatgagcagtcagcggagcagaggaccgcggccagctcttccgatgccgggtagtctaggcgtatgcgagaaggttgagatgcgtaacgaacagccgctttgtctgcgacgtccattgaatctcccccaaccgcccaacacacggtgtcactgtagtcacataattgcaacatgtacaacatcgtcccgattgataacgtccacgtcgatgatcagaccattcgtcgttcagctttcgttgaccccgtcgcgtctcaatggagaacaaggtttgacgataagcgctagcctgacaccaatcgacacagcctgacatgtttaagaaatctcggctcttcctgtagctgggcctgaacgaatgcatttcagaacaagtctccttcttcacgatctcacctccgacctgttctcacctgcaaaaagcaactcgtcaaatcgagagtgactcaactgtatcttgagatcgaatccctattgctcgtcttcccccttcccccgtaatgtcatctgatatggaagcaacctcggccatcgtaagctataaaaaatgcgaccaccccgcatccagctgctgatcctcgtcatcacggtgtcgctcactccagctcggcgaatacatgctcaagggatggacccttacagacgttcactgtccgcaatgcaacacgacccccttgatgcgtgaacccgctcgtcaggccatcgctgaaggacgaggcgagaacgcgaggatcgaattttgtgcgaggtgtcagggtgctccgggcggacagcgggcagaggcgccaatcatgaggggggccagcggggctgtcaacggcgtcaacggccacaagagcgataccgacagcgaggacggggacgaggatcaagagatgggaggcatggactccgacttggagagagagttggaggcgtacgtcccagagtcgtatcgtcgagctatgggacaggaaaatgcccaggcatcgtcttcgttgccgagcgctacccccaatccgacgatagtggacagagaccaggctagaagggaacaatccgaccgggcatctgagcgaatgggctcgttgatgttgcaaggctattccctcttggcgacgctatgccccaacccgtcgtgctacgccatccctctcgttggacatccacgaaggagacctgcgggaggcgaatcggcgtcgagtactaggggaccaaggaaggagtgcgtggtctgcggcaagttgtgggaggcagacgggacggtcgttagagagtctgtcggccagaggaccgagacgtctgtgccggccagaacgatggagacctcggcatcagctgtacaagcaactagggccaacgagtcggctgcatctagcggacccacgatcagggatatcacgagggaagaggcgatgaggatctactcgggtgaatctcccgcggacgtagcacgatcgacaaatacgacagcgccggcacccttggtagcatctagcgacactcgagagcaactccaacggaccgtctcggctcgtcctccctcggctggcgatctggatcaagcgacggtcttggagcattcgcatcaagcgttgttgaaagctctcgaacgcgttaacgaaaagatgcgagtcattgccgagggccccgaggacgaattcgaagagtacatcgaacgtggacgaatcttggagcacatccgtacgcagcacggtctcatcgacggtttggaaaaggtcaacgagacgagggcgaagatgttgtaaatggtagatatcacgtgattgttcgtgctctgtctcgtctgatgacgtcagcaaaatatcacgtcactttgccctgaagtcgtcatcggcctttcccttagcgcttgtcactcgtcgatcgatggtaaggaccccgatggcatcgtacagataggttcgagtatacagaatatacaatatacaaaatacagaaccgacctcgacacccaccccgactacccgtgatacctaagttcctctccacgcaacaacagctcaatcacttcgcccatacaaaatgtctgcctcttctcaaatcgccgtcctgctcgaaaacgaggtcctcgtcgcttcccccgagagcgatgccattcaggtggagggcagtgagtggtcgtcgggtcgacatcctttttaccctggaccactcgcaggctgaactgtggtgccatcgtcagacttttactttcctgaacaggacttgaagcatcgtgagaggtacgaggagagtgacacccacaccacttgcggctggaagggtgagtcgacggtgtcgacagcctcggcagaaaggcctcgcgctgatcagccatcggcggtcgataatcggatgctaggtgaggcttcgtactacaactacaagaagcctgatggaaccgtcctcaaggacatcgcctggtgagtcgtcgcgacgcgtgagatatatcatacgtatcccgagtctgatccgtctcgaccatcgtgttcttgtcaggttctaccccaagcccaagagcggagccgagcaggtcgctcagagggtcgccttttacgtcggaaaagagggactgaagatcggcgaaccccctctcgatgcacccaagatctaggcgtcgtgtcaagccgtccttgtaaaaaggcgaccacgaatgacatcgaaagcgatgtttgtacccaaattaggcgaaaggtatcgatttcaatcagccagtcccgatgtttgatcttgagcgaaggaggggtcaacaagtatcaaaggcaactgggtgtcctcgaatctactaccagctacgacggcaaccgaccaatgtccagcggcacgagcgtgacctgtaccatgaggtgtgacccgtgcgacctgtcacccagctggatgccgcagaaccgaccggtgtcccggagacttacgaacagtacctattgaatctggtgacgaactggtagactttcaactttcgactgggttgtcaacctatacaaaaattcggcggtcgttaaacaaaacttgccaaatcccacgcaaatgtagctacgtcccctgctcccctgtgatcctgtgagcagttcaggtgtcgtttgttgccaagttgcggaggtgcgcaggttacgagaggaacggtccgacctccaccttggcctccaccgagcccttcaacgagccactacttcgtgaatcccgatccgcggtcgatcgacgcagcggacgatcgtcggcaatgtaacgccgggagactgtgtgttgcggccgtgtttggggacagaatggtctgtgggagtcaggccgggatctgatacggcgtcgagggtcccggggtcgtcgtatgcaaacccgacgcgactggctaggcccgacgcggtaagttcttgcttgttgtttggagacacggttgatgcaacgctggtagccagcaaggagtctggttagcaggtaatcgtgtgacacccgatgttggcgaagcgataccatcactctcgatcgtcttgctccgccgtttgccgaggacgaccgtccgatctgatgaaacgactgcggagagttgttcgatcgaatcggtgacgaaggtggtgacctggatctgatagtcgcactcaccgcgaatccccatggtgtccaccttgacccgatattgctgcggagaatcgagtcttcgtcgctccgccaagccgatcgccgaagcttggggaagggggtggtggagaagaacagaactcacgggagtatatcgggctttggtgacgatcatgttcgcatccgcaattttggcgttacctcggcggtttccccgggggcgaccgaccgatgagatggtttgccaaggaacatgagaagagaggtaccgaccagcggcaagcaacaagcgacccaaagactacggtgaaccctcgcagccacgcatgatggggcgacggaagcctcgtcgaacggatcgtcgaccccgcgtcagagaagggtgggtgggtgacatgtagggaggagaaaggaagtctgaaggaagcgggcaggccgcggccatcgatacggtccagtagccagtagctcgagtgcggcggtcacggggccaggatcgatcggaaaagatggaaatcacatataaacacaccggaccgtcaacaaaccatcaactctggccatcacgcctatgtccccctcccgttgaccttttcctctctttcgttacgaacgtcgattctgcgatacatttcccaccaacgcccaccaaaaagccaaaccagactaaacaacaatgcgtttcgctgccatcgctaccgccgtcgtcgccgctttgacctcggtcaacgcccaggccctcgacactgcctacatcggagtgagtagcatcgacgtcgcgtctagccttgtgttcccgaactgatcgtctctggtcatcgcccttcgtcgtcttgcagcaagtcatcgccgctctgaacgctgccaacttgacctcgttggctggtgccgctcagagtgtcgccaactcgaccgagggtgccgctctcttggcccagttgcagggaagcaacaagaccttgcttggtgagtgtcgacgggcggggctgataccgattccatcctcgaagctaaaatttttcatgaccacgtagcccctagcaacgaggcctttgccgccgttcccgccgaggtctctggcaacacgaccttgctcgccaacattttgagcttgcacatcctcaacgcttccgtcgctcccatggacgtcgccgagggtcctgctcacaccatcgtcaggtcgttgtacaacaacatgatgctcaacggcaacctcaccgtccccgtcgtcctctaccgaggcaacgagagcgacgccgcctccggtcctggagtcatcatccagcaggctaccggcaacgtcaacaccagtgccaacgctaccgccgccaacttccagatctacgtcatcgacgaggtcttgagcttgccccctactctgggagaggccgctggcgagctcttgcccagcttggccggtgtcatttcgggtgctgaactcctcgagcccctccaggccgctaccgggttgaccgtctttgctcctgccaactcggccattgacaacctcaccgagaccttggccgccttgaaccagactcagattcagggaatcctcgccaaccacgtgagtccccaggtgcaggcaaccgaagtgacgtctcattgctgatcgtccctactcgcgaccctaggtcatcaacggaaccaccgtcttttcgacccagctcggcgagtcgggtcccttcatctcggccggcggtcaagagttcatgttcaccaccaacgacactggtgcctacgtcatgagcggtaacgtcactgccaggatcatcatgtccgacgtcgtcattgccaacggtgtcgttcacgtcatcgacaacgtcctcgtcaacgccgagtccaaccccgctgccgcctcgtccgctgcgtcttcgtacgccgccgctgccacccagaccacttcctcctcggctgccggtggagtcgtcggaggtagccccaccagcatgggaaccgccgctgccagcggtaccggagcctcggctcccgccaacgccgcatccaaggtcgactttggcatcaagtcgttgatcggatccgtcgtcgccgtcgtcggtggactcgccgtcggtgcttcgatgctctaagtcgtgccctcaacctcgacccgactgtatatacctcgccctaccggcatccccctggtgtcccgtctctcccgcccgcgcgctctctctctcacgtctatagtcgcctaatcgctcgtgttgatcaatactctgtccgtcgacacgaatatgctgtctatctcattcagtcgttacgcgtttgtcgtcccccgatcgagatgttccgtgatttttccgattcaaaggatggcatcgaaagggatcatgaggtggatcaccgagactccgaaccgaatttctggtggatctcggtggcatctccgtgtttcgaaaggtgaacgacgatagatgacaccgaaaattaatcacccgcgtggcttgccgagaggttacgaacgcgagcgggtgaagggatggatggatgaaacgcgatcaatctcggcgcgtcatcaaggcgtaatttgcagggatctctggtgatctgatcatcaatcaacattgacgggtcgggcgggactttcgattgatgaaaagaaagctgtgatggctgatgggtctctgtcatttcccttccggacggaaactaaagccgtgaccctcgaagtttgtttcaaatacagttgagccgttatttgacagagttcaggaaggcaggtaattgtacgaaccctatcactcgcagcttttccaggcgggtaaaagtcggaaaagttgaacgtcagcaactgaatccgccatatagtagtggtagctagctcgtgagacccgcagcaaatccattgacgagagagccgacttgtaagaggttcccagcgaatcaaaatcgagtcatactgctaaacgaggatggaagcccgagccgaactgaaattgagcatcgagagcattcttggaggtccggtgagtcgacgttcatctgttccaaaccgatagctacgactgagtcataccgggaatcacgtagttctggggcatggtcctgacagccgtgagttgtcgtcaagtgaccgttgtccctgaatcgacccagatgcttatcctcgacggtcaatcaggtcttccagggggtcaattgcgtcgaagtaggccctcttcactcttcgtcatgtcggagatgaccctgctcataccagtccgcatctcgtcgccttgcagctcatccgatatctcgcgacgttcacctcggaacctcttgtccgatggctcatggtcgtgcccgccttttgcctttcggcggtccaaaccgtatttgtctgcgcgtggacatacaagcagttgatccaagaatggggacagctgagcgggttgatcaagcatgggtttgtgagtgcgagaccgggcgaagttcagatcgatggctgacgcagaacgcttctcacgccagatgatctacgccggaccgcttctgacagggaccgtcatggtcatcgttcaggcctactatgtgagacgactgtatgctgtgagtctagccggcgatgataggatactggataacaggctgatacaggatcgatcgaacagctgaggcaagaagccaaatggatcctcgtcctctacgctctcttgataccggcaggctgggtcctttccgtcctgtgagcgtggtcggatgaccggatgacaatcttggtaactaggtcggaagactgacgctggactggtagaaacacttactcggcgaccaaagcaccgaggtttgccaacttttacaacgtcaacctcgatgtcatcgccgcctgggaagctcagtggaaaccgcttcgtgggtcgcgacgtgcgtcggtgtcgatattgtgcgtctgacccctcgccttctcgcgccgcaggaatcgctcaggctgcagtcaacgtggccacggatgtcagcatctgctttgggatgctctggacgttattcaaggccaagacaaaggttcgcggtgatagcctgtgagtcacgtcgagctcgggtctgagtgaacaacaacaatgacgccccatcgcaggaccagaaacgtcgtcggaagactcatccgtctcgtcatggacacgatgctcttgcccactatcgtcattgtcggggtaacggtcatgtacctgatctatgtgggtttgagaacggacagattactctgggatgctcgctgatggtgacgatcaagggagacgcggatggcaagcaacgattgttctcatatccgcagagtgagtttatcttcgagccccatccagagctcccgaacctcgtcaccaacgtacaactcgatttcagccgggatcaacgtgttttcgctgctgcacacgcttctagcgcgacagagcctgcgacagatggtcgactcgcaagccacaccttcgctctctatccacctaaccgaagacatacctgggggcagatacgagcgtgctgaagaccgtgccaagtcgagggcgacgatgcagagtccaggcgcgggaataagactggctcgacgcacacccgcagctcagggtccagagcggattagcgagtacttgtcggacgaggatgtggaaaagggctattcaccgctcgaacatcggagagaaaggccgatttcggtaagtcgttaggagttccatagtgggatcggattccaccctgatcgccgcctgccatcaacagaccgaacgctctttgtcgcaatattcgatcgggaacgactatgacgacaggatcggagccagatccgtagcgacggtcagctacgaaatggataagttccgaatacatacgccgccggtaagacggacggagccgagcggtgttgaatcgtgctgataactaggaaaccacagaacgtctaccaaccgctcgacgatgcgacgttgcgagcgaatgcgccggggttggaaaggcagccgacgttctatcaggaggtcaaggcgatcaagttacatcatcagatgaagaagcatctcgagaggaggtagtcgtggcattgaggtgcgggatactgttggtcgtgtataagggcgaagtgtgctagcgttgccggtcatgcgaacacgccggccaaatgtgtatatggttgtggggaaccgcaaatgatctccccgttctcagaaatggtagttgacacgacctatacgacgcagcgtcctttcggaatctatcacataaccggggctcatacaagggcgaaccgatgcgatcagaccatcaatcccaatgctcagctgggctgtcgggatgctccttcatgtattgtgcctttctgatctctctctctagtctcatctgcttgctgagatctggatcagcgacccagtagtctccggtgcggctgtcaatgatggcatggtattcgtcggaggtatcttggtccttgtgccagctgtcccaaaacacgtaacctccgtcgtggctcatgaactcctccttggtatggcagatcccggctcgacgtaatgcgggccagatacgtttgccatcctcgtcgtagtggatgtacgccttgtcgtgagggtccggacgacgatgaccaccagggtagttgccatcctctctcaagtcgacggcttgacgcgcttccatgtcgaagaggatcgacttggcagcgtcgcccgtcgcttgatgatactcgccggtctcgttgttgaccacgcggacctcttgttcaccttcggcgtactcgagttcgacccgcatgttgggcgctgggacaagggcgtcaatgtcggcgacggaagacagggttccgacgagtttggtgccggatgtgtagccctcttgctcgagacccgtgaagaactcgagcaggggcagctgcgggtagtcgggcggattgccgacaaagtaggtgggcatcgttgcggtttaatgaggtgtcccagagtgtagccagaggcaacgtaaagctgcttgtaccttggtgttatagctctataatctgtggctaatgacgacaacggcgacgtaaccaggacgcccgctgacggatctgaccgacaaattgaggtgacggcatccatctcgtgctaaattgcttccgtgaagccacgatgtaccactcacggaggcaatccgcggtccggggaatccacggggggtccaggtcatcgagttgatcatatcaacacctcgacctcgacctcgatcacattgtattgctggcaacaccacctcgtcctctcttgtcactccaggcgagcaacatgtcgtcgactaatgagaagatggcaagctatcctcagctctcgtttgaagcccgtatgttccggtcctcgcaagccattacacgcagagtcagttgctgatcggaatcgccggccttgcctctatgtttcaccccaggtccgaagcatatccgagatcagattagggtgagtaccagtggccaagatagattactcggccagatcgacccgcagctgactctgttcgtggtgcacccgtgcagtcccgcttgggccaattcatcggcggtcactatgcctcgcaaaacctctcgtccgtcctgttcacgcagcgaaccgacgcgccggaaaacgtcaagatgatctactggagcgcaccgggacgtactaaacctggattcgaagaggccaagaggatgctgaacggtcgaggcaaggtggcaaggaagggcatggagtttggaccgagttgtgggtgatgtccgccggcgttcgcgctttgaccaggctgaccggtgttgactgttctcctcggtcttgttcgatcgtccgtattttaggggtaaactttgacgattcttcctctgcgacaacatattgaagcttatgcgattctgcccgtgatagaccaaccactggttcaagttgacgctcaagatcccggcttcgtggaaggattatgaaagagttcagcgtgagtgtgtaggcggcgagtcaagcgaggtcgtcaaatctgacactcaagtcccgcatctgtagttgaattcgattcttcgggtgaagcactgatctttactcccgaaggcgaacctttgcacggtcttacgggaggatacggagtcgaacgtcgggtcgaacacatcatccctcctaaggcgagaaagagcggggtctatgagatttacatcgaacatagcagcaatgggatgtttgggatcgataacatggatcctcccgacgtgagttcaggtcgggccactggtaaatgaggtgaccgtgtggctgaatccccgcgatgaacatgcagcccaacaggtactacaaggcaagttctgacgtcgtgaccataccgccgcaaacctcgtcttatcctttcgattgcagctcaacagcgcggacctagtcgttccgaatatggaagcctggtgagagcgtgccaagcgttgtcgcactggagtcacagctcatcgtgacatcccgacaggcacctgatgtgggatttcaagacgctccatcaaatcaccgaaacgcttccctgggactcttccgtgaccaaccgggctctctacgtcgccaatgagatcttgaacgcgtttgacccgaacgacccaagtagcttgggtaaatgtcgcaagttggccgagcaggtattgggctcgggttgggaggaccaaatcgccgagtcgaggcacgagggcgaagatgcggatggcacgttgtggggtgtcggacattggtgagtatcgggagattctgcacctgtggatggccaagctcagtccgcattcactcgtcttctcagtcacatcgataccgcctggcaagtcgaccacgtcgaaaagatggcttcgcttgctcgcgctcatctcatgctctttataggctctggccattttccgtgacccagcaaaagtctgccaggtcatggtccacgcaggtgagtacgagggtaatccgatgtggtgtctcgctcggtgtcgcttgctgatcgcccaccgttggccgccagatcgacctgatggaacgttacccggaacacaggttttcgtgcacccaggcgcaacaatacaagtggctcgagcagttgtacccatcgttgtaccagaaggtcaaggccaaggtggagactgggcagttccgtgagtggcgttcgaacttggcttggaagtgagcctgctctgatcgacgtgtccaagcagaacccgttggagccacatgggtcgaaatggataccaacatgcccagcggagaagccctctgtaggcagtttctttacggtcagcgctatttcaagagtcgttttggatcgaccagcccgacatttgtcttgcccgatacctgtgagtcgcttctgacgggcctactatcactgaaaatgctcatcgcgtcgtctcgggcttgattagtcggctacgcttcacagctgcctcagatcgccaggttgtccggatgcgacaatttctttacgcaaaagttgtcctggaacagcatgtgagcagggttgtggtggtcctcgccactttgctcgctgaacccgatcgccacacgcagcaactcgttcccgcattctacctttaattgggtcggtctcgatggcagtcaaatgctcactcacatgaccccggtcgatgcttacaacgcccaagccaacatcgacgagattaggcgcggtcaaacgggcaacaagaacctcgaagtcaccaagcaggcgttgatcctgtttggtaatggagacggaggcggcggacctactccacccatgctcgaaaagctcaggagggccagggcgatcgtgcagtgcggcgaggccacctcaagcgacattcccttggtcaagatgggtgggagcttcgatcggttctttgagagcgtcaagagggagaccaacaatgggaccatgctgccgaattggtaggtcggtttgaggcggtgggactaggatatgcgcggctgatctcggcaagttaggcacggcgaattgtattttgagctgcatcgaggggtgagtcccgccatggtgatcttcgcggtcatataaggaaactgatgcgatgtccgtgtattcgcagacctataccactcaaggtgcgtatacacaggtcgttctggcagggcgatgctgatatcgatctcgtttcttattcctctcgtagccctggtcaagcgaggcaatcgaaagggcgagctgttgctacgggaagtcgaatatgcggcaaccatggcttcattggcggacgatcagtattcatacccgaaagaggtatgtcgcgacgacatcgccagcgttcgacacctcggctgattgttgacctgacccacaggacctggatgaagcgtgggaagagttgctgctctgccaattccatgattgtctacccggcaggtgagagtttagaactggctacatctagagacgcgtcgactgaaagctagtcgccgcagtggaatccgtctagtatacgacgacgtctgggccaaacaccgaaaggtcctagaaatcggcactaggctgctcgaaggcgcttatcgggttctttaccctgggactcacgccattcccgaagacgggttcgcgccaatctacaccgccgaccagatcaatgtcgtcaaccctacaccacacatcgagcgtcaagagctggtcccgatcaaatgcgggaaaaagggctcgctctggcaccagtacgaaggcaagacgagtactggatacctcttggccgatcatcgtggcgtgtccgatcgggtcgctccaggcggtttcgtgtctgtcaaccagcaggacgtcgccacttgccagcttgccaactcgacggtcaagctacaaatcaaggatggccggatcgtcagcctgtttgatgagcaacttcagcgcgagttgatacccaaagatcagacgggcggtttcatcatttacgaagaccagcctgccaattgggacgcttgggacgtcgacgtgtatcacttggaaaagtttacccggcttaggtttgacgaggtcgccattgtcgagcagggaccgatgcgagcgagcgttgtgggtcagacccggtttggctcgtccaagatggaggtcaaggtgcgtttgcccctcgtcacttgtctcgacgcgatgcaaattggctgacctacggtgtcggtcggtagatctctttggatgcctttgccagtgagtatcggtggggatccaaatgtatgtcccgctcgacttatcacacggtccatcaacagcctcggtcgaaaaaggcgcgcggtctcctcttcgattcgacgttaagatgtgagtgtcgtatcgcaaagccaatcacgatgatcactgatcatcgacgtgtgcagtgactggcgagaacgtcacaagttcttaaagtgtgagtctgtcccgtcgtcatcgtttgagagatcgggacccaacctgactgaccggcgcgccctgcagtcgagctgcctttggacatccattcggatttcgcgacctatcacacccaatttggtatcgttcgtcgacctactcatagaaacactagctgggacgctgccaagtgaggcacaggtcgtcgaatgtcaccggtggtgtgtactgatgtcgggtcgctcgcagattcgaagtttgcgcgcatcagtttgccgatcgtgagtctcaaaatcgcgaccattcgacttgccgccgatgctgatgctagcccccctccactaaagtcagcgagtacggctatggagtggctattttaaacgaatccaaatatggctatgcgaccgagggcaatgtcatgcgcttgtccctgttgcgcgccccaaccctacccgacgccgatgccgatcagggacagcacgcgtttgcctttgccatctatcctcacgccggcacgttcgaggagagtgacgttgctgaagttgccgaggcatttaatgcgccgttgcgaggtgagtcttgtcgttgttcgcccggcgtccttgggtttactgacatgaacggacctcgacagtccgctggaggtccgtgtccaacgatggtgacaagcacaagcccgcgaccccatctttcagtctgtctggtgctcgcaatgtcgtcctagagaccatcaagcggggcgaagatgacgactttgaaggcggacaccgaaagaccatcatcttgcgggtctacgagaggctcggtgggcatgccatggccagactgaatatgttagtcggattgcagtattcgttcgcgttgggaagtggctgacatgtatccgcgtcgcgtcagtgctggcctcgccgtcgaaaaggcttccctcgtggacattctagagagacacgtggccgacttggacctgtgtacgccatccaagggtgacggccatcatctcgacatcaagttccgaggattcgaggtaaagacggtcaagctcgagttgaacaggcgtaaaggcaggagtgacagcgtcgttagcggcgattgggtcagggttgtggagggacaggagtgagttggtaagtcgagagggttgtttcaagaatagaaaaaaaaactgttcgtagaataaaacaaaaagaaacgttgtatggaaaggaattaatggtctagcagggcacagcttagatgcccaggtgatgactatgacacgccgttgttgtggtgagcggtaccaaatgggacgttccaccccggcgtctcacttttgccaagcgttctcacagaggacagatcttttcatctctcaatgtgcacagccggctcaaggaggacaggattatcgagctgatcgaccggctgacaccaacaaccagaccctctagtcgatatcatgaaggtcaatctgtaacatcccactagcgacaggcgaccggcgacgtttctagataactccgaaaaaggccgatcgttgtagcggtcaccggaagtttatttgcatccgaaatcttccccctttcaatgagattgcgggtcgtcactcgttgccaaggacaagtttgacaaagctttgtgagtcgatctctcctttgcgacgaagtctccagctcgcagcatgtcaaactattcgatgcaaggtcaagtcacgatgttcgacgtaaattcggaggttcacgatgctgtgacaacgacgactccacgatcaccactggacatagactaggactggcctttgccaagacgaacgctgggactctcgcaaccatgcaagccgatgaatgtttcgaggccaacacgcagaccaagttcggattacgtctgggaggtctcttcgtcgtcctcgtcacctcgttcatcgggactttggcaccgatcctgttgaaaaggcgatcatggtgtccactggcgttcttcgagtgagtgtcgatgtggggtcagatccgggcgcgactcgggttactgatgctgcgcacatttgtgacctaggtttgcaaagtactttgggtcgggggtcatcatttcgacggctttcgtgcagtgagtagcgataaaggcagtggcgatgcgattccctcggctctgctgacaccgctcgtagcctgctcgcacccgcctttgatctgctatcgtcgccatgtctcgggggagcttgggcgaattatgtgagtgtccaaagtccgggtcgtccaattcgatgctcaaggcctgtcgttgcgtaccgcgtcagaactgggcctcggcgatcgcgatgatggcggtgtatttcatctttttcatcgaattcgctgcgtatcggatcggaaccgccaagctggccaagttgaacgtcaggcagggtgcgttgagagagtgcaagtagacaagacgtcgatgctgatctacttgaatgactctcgatagacccacatggacggatactcgaaagaccaaccccagacgtccccgtgcttgtcgacgaagaagctcatcgaatcgtcatctccaccccgctcggcgtcaagtcagatgacgtagacagtttcaacgccgatgtgactccggaatacgacacggcgacgactgatggcgtggctcaactcattgccgtggccattctcgagtttggcgtcattatgcattcagtgtttatcgggttaacgctcgtagtcaacgaggagtttaccacattattcatcgtcatcatctttcatcgtgagtcgaagtgagcgtcaggactggggatacaacacggtggctgacgaccgtctgcttgcgtgccgtgagcagaaatgttcgaggggcttggggtggggtcgaggctgtcagcactgcgtctcccgcccaacatgcgctgggcaccgtatttcgcttcgttcctatactcggtcacgacgtgagtccagtcgccagcaaaacgaggccgacgtgtcagacctgacctcgtgtcttgtacatctgccgccagacccatcggcatggccatcggattgggactgagctcgagctacaaccgccgcagtcaaacgacgatggcggtcgagggggtgttgcatgcgttgagtgcgggcatcttgttgtatacaggactcgtcgaggtgagtcgatgtgggatcgacgggaactgttgcggactacaagctgacgttttgcgcgacagcttttggctcacgagattctgttcaacccaaagatgacgtcggcgagtctgggtaaggtgacgtatatctttacgtgcatcttggtaggcagcggcatcatggctcttatcggatattgggcatagcgcagggcggcctgcaacgttgtatacaagccatgccctatggataatcgcagggcgtcttcttggacaacagggtcgcgcgcgcctgggagccagatatgttgacagattattctacgggccggttttcgacattgggaaggctgggagcgattgcagatggatccgacaactgcgcaagcgactcgaaacagaaggggtcagcggatatgggctggcatgactcggtacgccgtctagccggaatcatttcctgacgctttgctgattagcctcgccgcttcatagccttgtctaaagagacccccctcggctgcccacgaaccgtttattcgccttttctctgacctgcaaaggaggacgaaaaatctcacacggtcgtcgagcgtcacttgcccccgggtcatcaatgtcgagcggaagcaaataccagccattcgacacgtcattttgaggtcaagagacattcgtcccgtgtgccctctgatctatgaaaggagatgacctggctctgatacaaagacctggtctaatcgcgagcgcgctcacttggtaatcctgcccggccacgagaccgatcgccgcggcccgcctgtaggtttgcctctcgcgtcacaattcgtcaagtcgcttgatggtggcccggtgcggtcagctcgtcataaggatggtcttcttcactatatggaccagtgaaagcaagaagtttcaagaattcggactgcaagacgtcgtgttaagcggttccttcgcgactgcctatcgttgctatccctaggcgatcgacgcggacctcaccgctggcatcatatcatcagattaacggacgacgagactcatcctgatcgatgtttcccggcacctctccggtatattcgacttgccccgactttgtaatcgttcggcaaccggtcgagaaatcgttcgacgccacgcaatcccagtccgactctgtaatcacgtgactagtaaaagccttctcggtcgcgaatcctgggtgacccgacccacccttcgtccaactcgtcgtcgagcgtttagacaacaatcgagccaggaagagaactagacatcgtgatcatgccatcctcttcacgatagccagcatgcacgagagttagttctccatggagtagattcctcatcacccggtattctggatatccttgtcctcattcgcccacgacgtttgcaccacgaaccgaaaacgagcttctccgatcacgatcaatcacgcgacgaccttgtttacgacgagactattgacgacatcgactcttttcgaccatcacgaccatcagaagagggtagatacatacgctaccagccttctccacctaccaaacagtacacagactctagtcccctctcaatacaccgcttcgatggccatgtcttccgacgaagaatcgacctactcgtccgccgcaggatacagccatacttggtacgcggacccacccgaatccagcgcttccagacctccctatcagcaagtagccgtcagcttggtaagtcatgggtgttcttggagagtacaacaagcgagccggctggttgacacatcgtccacccttgcagctcaacgattcgaatcgattcaaacgcgttggcaagggagaacctcggattatcaagaatcgaccggcgcctaaagctgcactccattgcgtcgactttttcccctttggcgaaccggatgtcgagcagctcagacgaacgcaaggggaagaggtcaggcaacggcagcgagtccatcggtcgcggaagccagccgaggacgacgagaacgatgcgggtgccgagcagcaaatcggactttttggcaagatgatcaaacagtggcagggtgtttttgctgtttgtgggggacaacgaatcatcttggccaggccttcgcaagaggagaagatgcagtttatgtggcacctggacatcaaggacgacgagctgtatcatctggcgtggtcatatgacccgttgacctttgaacctctgatcgcggtgggtggtgcgcttgggctcatttatatcattgaaccaggtgcccataagatcagaaggacacttaaaggtcacggtgactggatcctgtcggtaaagttctcccccatggaccctcatatcctggcatcggcatcgggggatcgtactgtcagggtgtggaacgtgtttggcggtgacctcgcggacgatctcgatcaaccgagtcgaaactttccaatgggcgacgccgacgaaggtgatgcgtgcgtatgcatactagcaggagagggagcggcgggtcacaagtgggacgtcgaagcggtcgcatttcacccgacacagcgagccatcgttacctgtggaatggatttcggcgtgcgcatctgggctcttcccgaatacccagaaatcaccaactcggcgccgtacaagacaccgcagggttatcgtcctcaagtggtgcggtttccaatctttggaacgaaccggttgcacgaagatgccgtcgactgtatcgattggtgcgtcgcgatggtgcaaacgtatgtcgagagccgccgttgactccttcgccctcactttcaggctcaccgaggacgtcctgatcagccaaacgcgctgcatcgtcatcgtctggcaatggttggggtacgctcgttattttgggaccgataaagcgtcatcccggtcccaaaggagcgattggtttaattctcgtgagtttggtttcggttctctcggtgacgatcgtggcctcgctgaatgcgttttcgtccgcctaatcccacgtctctcgtctctcgtcgcattcgatgtgttcgctggtcagactcgttccgaattctcgcccattaccccctcccgggagccttctggtatcgtcgattcggtcttcatcaggcttggggtgagcacgacgaggcagaatcgcaacatggacacacctctggatccttgctggcggtgatcgatggcgtcacgcaaaagattctcgtcttcaaccccatgcatatcaagtatcccgacgtgtcggaaatcgtccctcctcgattctctggacgaaacgatcagaaccccatcgatgtcgacacgaatactttgccggcactcgtcgcgctcgactcgagtccagtggtggcgttgcccgcagtcaaagaggagggtgatgacgatgggttgaaggtggttccaatcgtgacaggcaagacgagccgagtcgttccctcgctaccgcaagtcccgcttctccaaccgtggactctgccgccccgcagtctacaatccgccatgagaaaagtctgtggtcatcgcgaaaagggttctgtggcgctgcataccgtcgcgattagccctcgaggagctcaatacgtcgtcgctgtcggaacccacggatcgatcgttttgtttcagctcgagtcacctcctttgcgcgagggttagggaggcgagcgaaagggggttgggtgtttcaagtcgacgaccgggagctaacacctcaaaaggcgggcgtcgagagttggcgataatattccctcgctgccgagagtctcgtcaaacaacgtccctcttcccggtcaccaaccgattcctcccattctatgcgcgcctttcgttttccttccctgctggctctggaagtctgcgtcgtcatgtgtctcgccgttaatgctaggccgaccccgggaggagcagtcaccgccgtcgtcgacgtgaccgtgtacgagactgtcaatcccgggaccaccagtagcaccggcggcgtatctggcactggcactagcgacgtgtccagcagtagcaccagcaccggccaattcactagcgtcagtaccgatgacgtctccagtaccggcgccagcgacgcaaaaacaaccggatctgccaccagcgattcctcttccagccgcaataccgagatgaccagcacatcgtcctcgtctgcgtcgtcatcacccgcatcgtcgacaacatccgagacgaccgagggctaccccgagacgaatccctcatcgaccgtttctccagttatttccacagtgacaacgacgtcagtttactccgaggcaggaggagcattaacgaccagcgctggggtacagattgtcaccatcgaaaaagccgcaccggcgcccgcagtagcaacgatcgtaacccccggtccaatcgcgtctccagcatcgcttccgggtaaccccatcgcacctcgtcccaccggaaccgccatcgtcgccgttaccaccacctccgtaacctcgtccagaccactatctcgccttggcaccatgtccccgtcgtccaccaccgtcaacgccactgccatcgccctcgtccccctcaccaccgatacccaaggcgcagcatccccggcgacaaaaatctcgacgtcccaaatcaaaccacccgacctggtcgaccgattgcaacaggccgtgtcacgcaaatgcgaatccacctgtgccgccatgaccgacgtaacgatcgattgccaagcctctgacgtcatcgatcggttccccagcgccaaccaagccgacgcccaggaacgatgtttgtgcagccaacccgaccccgtccgagaatgcgccgaatgcatggccgggttgagcgagttgggggtgtatggcagtttcatcaaccggtgcagggtagacgggttgttggtcatcgaggagagcaaggtgggtcgtcgtcgagttccgggtcgtcgtcgttggctcacgccgtgttacgttttcgcagagtatcaccgtgaccgacgctcccaagaccacggtgacgtcgacttctaccgcgacgtccagtgagaccaccagcaaccccaccccgtcgtcgaaaagcaccacctcgaaaacgacgtttggacccgaagaaatttgcgacgtcgacgggcagtccatttccaacaagcccggtgagttcggggtgggcgtcatttctgacttgtttgccgtgccgaacctctgactcgttcgtcgcgcccacccgtttccctcgctttttatgcagcctacgatcagtgcgttcaagaaactcgggcgatgaacctgtcgatcggtccagacggtaccattcatcaggacaatcagggcagcggcaaccagtcggatttctgcaaggatcccgggtcgaccagcagcgcatgttattcgactatatgtcagggtcaattcagcgcgggttgtttcaggaagctcgagggtggcgtcgtcaaaatccgagccgccaattggatggtgagcgtcggggtcatcgtcgtcgtcgttgtcgccgctttgtaatcttgtcagcgagtgaagataaaagggttgattccttaggggttaggggttaggggtccccccggaatctgcggctacccccgactgacttgacgactcccccgcccgcctcgcatcgcagcctcgtcggctctcccttaccgacgatcccagccctcgtggtccaaggcgacccccgaggaggtctctgaccagatcttcaagctcgcccgaaggggtctcggtccttcccagatcggagtcatcctcagggactcgcacggaatcccccaggtcaggttcatcaccggaaacaagatcttgaggatcttgaagtcgaacggtaggtccggcgtgtgcgcgcgcgatatgggcgttcttcgcaactcgaaaagcaatgctgacggggcgttcgacgaccgggcaggtttggccccctcgatccccgaggacctttaccacctcatcaagaaggccgtctcggtcaggaagcacttggagaggaacaggaccgacagggactccaaattgtacgtcgtcgtggtcgtcatgccttgccatctcttggcctttgccccaccgttcctctgcatccacgagctgacacgccccgcccgccacaccacagccgactcattctcatcgagtccaggatccaccgtctcgctcgttactacatcaagaagcagcaattgccccctaccttcaagtacgaggccgccactgcctctaccttggtcgcttaagcgcgtcgttcgtcgatcgtcgtcatcatccggcgtcttcagcgaatgtgtgtttttttcggctatggggtcacgaggatcgagaggatcgtcgcacggtgttgttcctttttttcgcgtttgtcaactctgatgaagaagaaatgtaatgatgacatgggcgatgccgatcgtgacgcagtggagtcgggacctgggcgagacggaatcgagttttagtcgtggtccagcgtgtatgtggattcgtcggtgcgactttgtgcgcagagttcatcatcggggaggccgctcggtgtgatggatggggtcgtggaggaaaaggcccgatcggcacttgtggcatggacctcgagattgtccgagtagcgtacagtcctgggcatcatgcaccgcaggtccaggtgatacccggcagtgtcgtgaagttgcagtcgagcaaagcgcttcctcatcgggtttgccgcagtcctgcttttaagaccggcggtcagacctggttctggtacgaagacgtcagagtcgtactttgcctcgatactgtcatttcacagcctgatcgatgtcggtcttgatcaactgaatcacagcagacaactgaacatgtcacaacgtccaagctcgtgcaccacatcgtgtcaggcctttgcaagtgacagtgcgcaaagcatcgctgtggtctatagtgctcgaacacgatgcctcgagaagctcatcccaccctccgcctagtttacgactggacagtctcactaaacactggacgacagcacaacgtgtcgctcagcctagaaacagtttatcgtaatccgcgcggaaagaatcatctgaaacgcggaaagtctttgcgctcacttccgtttctacacggtcgggtttgcgtcgcgaaaagctttcgctgtgcatcaggtctgttcgggctgctgactgaggctgaagatccacagcttgagttcgccataacttgtcagcgcggctgggtctcttgcaagatctgggtgtgatcaaacggcaagatgatggtcgcggtgagcttagcaccacccgactcgcttttgagtcgatgcctaaccttcgattgttagtggttactcagcgatcgatgtctgtcccgagagagaccaagggctggtgttaaagggctcggcccacgtcgctttgcgtttgcgagatccgaggaatccttcagaaccctgcaggtcgcgctagtgaccatccggacgttgaggaggcgcgtctcgaagaggcattcaacttgagtagtgtacataccttgtttacgaaataaaggtcgtttcggcgccgcataccctgactctcatctgcgataagccggcccgggtcatccagaaagctcgtcacgcccaagtcctggggacggatggttggaaaggtaacgagacccatattgaacgccagcgagaggcaatatattgctctgctatgggctggcggcgcacgacggggatgtcatgaccgtcacaaatgaaagtatcgcaatgactcgtatcaagggtattatgaagcccgaatcgatcgtggcattgtagatcgaaaatataacaaagtggcgctgctagctgattatgaaaactcaatagaacccccctgaccttcgaaaatatctcttggccgcttcgtccgtgccttcgatcggaccgacagaagttcggtctcgaatcgtcctggtcgaatcgactctagacccgtcggtcgaaccgcgtcgcgatttgtcgccgagaaaggttttcgacaatcgtcgaccggctttcccctcgtattgatgcgaatcgaaagcttgcattaacctggcaaaggtgcctcgtttatgttgtcgttgcgagtccggtgtggaacccgatcttcgaagtacaggacgggggcctgctgtctggacggagacaggtatgccagagaccaaggacctttgtacctcgagattctttgacgtgctggacatgaggatgggcccagagatggccgggcccgtattggtgtatcgatgggcgatacggatgtcctcggtgatcgcggggccgtatgtgactcgcgggtgtgtggggtatggcccgtgctgcatttcagagtaggaccgtgcggttaagcctggacggggcatctcgacagcgtgtgtaggaggaggtggcggtgcagggagactctgtcgatggtgcctgctggtaaagggtgaccgatccgcggcggtttgcacggtactcgcgatagataccatgggtgacgaagtcggctccgcgaagcgacggatctgttcagaggaggcagaaaccggggcttgcctgggcgtagcattgtcgtgcgaatgctgttgtctcctatggtgccggtggttgtgagtatggccagccggacgaggagatgatgtcgattccatgcccatcatgatcgattcggtcaacagcctcaatgcacgtttttcccgacagcgacgacactgcttcctttcggcccgtctctgttcacgtcgcctgcgctcatcttgttctggcgtggaaccaggcgagtgggccctggccgacccaccagaagaagatccggtagcagatcctgcggtgtggagaagcgtgccatcggctaagagcataggtgaaccagcgtgggactcgtcgcactctgtcactggcgaataaacgggaacaggcttgcgcgagatccgattctctcgcggcgacgtcgtggtgctgaccgttggcatagtgaaggagcggctgcctaggccgggcctttctgtacgtataacgcttgggaaccgaggctgaccggtccattcgctcgaccagatcgaatttcccgacaaagcgagtggcaggttggcgttagttatggcgaggcctccggaacgaggcctagccttgcttgctgtattacgaccattaggttgaggaagaacctgaagcgacacaggtctcgctctgttgggtggtagtgggaagcgtagctcgctgggtgccgtcgacatggtcggcatatcctctgccagatccggtcgtcttggcgaaactggggcgctagctatgccagttggggtacctagaaaggccgccatcgcgtcaaacttgatagtgggggtcgggagaggaggggtgtcaaagagagaaaatgtgggcgtgactatggcccggccagcgggtcttggtgtgagcaggggtgaaagctcgctttgtttcgaactttgtctgggatccccaaccgagatctcggaagccaaaaagccgaagtcttccactccgtcagcgaaagagcctcgtttgatttgaggtagtgaggcgtccgtcttaacctcttcgacctcagggaactgcgccgccagtggtgcagatgtcgtacaggcatcatcgacagaagggtcgataatcgccgtgtagctctcttcctcttgggagatctcgggcaatgatttggttcgcccagcccggaacaacttgctggagatgctctcagtaacagggggaagttcagggcgtcctgtagggatctcatcgggtggtccattcaagggctgtgcttgtggcatccagccgcggacagtcacgggctctcgcaagcggcggaggaattctgccggggccatctccggtgacggagtcagtaccgagtcaccagctctgaagctaaaggcacccaggcgtgggtattggtacgcgtcccgttgatgatccgctgcggtggcgacgcttgtcagagggaaatttgacaacgcaatcgggcgacggatagatgtctcgggggtcgccatgggaggaagcgattgcacctcggactcgtcgtcggtcggcatgtcctcggtatcgggagaccacatgttgacggctccccttcgtccgggaacgatgctaggtgtatagtcacggtcctcctcatctgactcggaggaagatgattccggcgatcggggcacgacttccactacgtccgaaaacttgcgtccaagactgtccaggctgcgaatcttggcgatctggtcgcgttcccaattgctctcagtagctctggacgaaacttcactgatcgcgctcgacgtgctaattgcactcgcccgacgttgcagtacttcttggaggagcgggtgggattggttgctagaccgacgccgagatcgcaagggcgagttagaaaatgaacccaggagactggaatcagaccccctccgcggtgcgtcaataggggagtccagtcgaattccacgtctggcagtgacggatctcgaggggctctccctaggagagatagagatgatcgaaggtctgcggtaggccgagttcccggttgaagtccaaggtagaaatttctcgtaaccggaagaatcgatctcggtgtcgggagtgatagccttctcgccagagcttgaatgccaagcggtgacagcggcaatatcctcgtattccgactccgagtggtcctcgacatcgtcttggcctgacagtcggcgtaggtagcctggcgattcggcagagtagttggacattggggaggacgtccattgcagagcatccgacgccagcccttgtgaagcgaacatgatcatgatcgggttctgtctttcaacaagacgagtccaggtcagcctatgtgacttcggttgtttcgatacctctttcttacttttaatttagcgctgcgctaacccgtccggacccgtgatatagtttcaaagagcttacaacgagaccaagtatgtttgtaccaaccagggtactcagcgaaccgacgacttcacagcgtcgtcagatccggtccgacgtgagattcgacctgaccgtaagatattggacgtgcatcctcgtacatctgttcctgccagggacgtctcgcgatatataagccgaggccgcatcgtaatgtggatagggtggtgtttgaccgatcgacaagtcgctttcgccgggatcgaagcgagatggcatagcagcctcgaatctccccctttgagcccgttcacatttgacaaactcgaaaaggagaaagcttgacagcggttctgactccgaaagctcggcccaacagttcggcacgttttagacttccgactggtcggtccctcgtgcgcgcggccctcacgacgcgcgtaacccgattttcatcgagagatggcgagtctgaactttaaagtatatggccgtgcacgtagccaaatgcacacggattctataccggagcacagaaggttcctgctaaccacaacatcaggtcagccatctcgtacagaaaaagatcgacatcaattgatccgtcgggtacgcgagcgctacgaaggccccgttgacatcataattgaaccgatcgccgtcgatcagttgatggcggtgtttgtccaatagaaatattctagcaatctagagaaatttccgttggttctatgtccgtttaagttgtgagccatctagagccaagtacaggtgttggacccgacgttctatcgttcaagccagtctagattacacgcccgcaaggttcacagtctctcaaaaaacgggtgaccgctctgccccgggaccgagggtctctgagacacgtcaaaatctccgagaagagcgggcaggccgctcacgggggccgcaactcggttcatcaagccaggacatcatagcctcacgaccggcgcaagacgatgttttgtaacgccggttcagtacctttttatggccgaagcgtggcaggttggtacgcatgcgaaaatatggacgaatcttaaattctgtctccgggcttctttcgcgtgccacacgcggtacaaccgtagactaccctgtctcgtcttcgtctgacgaagcgagcataactcgcttgcgggcccgcacgttggtgcgatggatcgtttcaggtccttctagattttcgtcagagtcatccgactcgacacccttggcagtcaaatcggcgggctttgcatggctcgaagcctttttacgcgtttggggttgaccggcccgaggccgaggtcgctgccgctcgggagcctgatggggagtgggcctttcgatagcgtgactttggatcctatcatcgtcctcgggctcgctgttgctttgcagtgatagttggcggctatgtcgtctcggaatcgatcgtgggcgttcctcgcttcctggtgactgcctgaccggctccccggccccaagcgagatattttttctatgtgcctcccgattagcagcttcccttgcaaaaaaggcggcgtccgcttcgacgtcgccatcggaatcatcgatgaactgagcactcttgtattgctgtacctcctctgcctgcttccgacgtcggggagccctttcctcgtccagcgactttctccgccgtttctttgcaggctttttacgcttacgacgcaataactcagctggcgtaacgccatccagggacatcggttcccgcatgaatgtttcgacaacccgaatcgaggattccaactcctctggaagcagaatctttgggatcgtccagatgacccctttgagggtcgatgttggtcagcagtgttattcgccgactttcaagcttacgtaggcagaacttactggatgccgcttcaggttgctcagggatatcctgctcaaaacgcagcagcgtgcataacagcttgaggtgcgggttgtagaccagcgcagcagcctgctcgtccgtatcaggcgtcaagactgcgtcacggatacagggattgcgtcaatatgaccatcttgcagtgatcaagactagcatcacatactatgatcggcaagcttctctttggcctcttccgatggaccgacccgcggccgagtatcatcaatgtcgggatcgtacaccctcggttcgtcgtcagtactgaggatgatttcccgtcttgctacgcagaccagcctcagtgcctgtcagaagcaatgatatcgctcgtgagcgtatgatcaacagcaaagatggacctgatcggcattcgtacctccacaagccacattacccaatgcaccttcctttcgtcaatcaagcaacgaatcgcgatccccagcttctgactccaggtaaattccttgtcaggcttgaattctaggtcggccgggattttcggtgcctggaaatatcacacctgagccttcgacacgggggttgaggttcgcacatccttaccttgactatcgatggatcatcgttctcgctatcatctcgatctgaatccgcgctggagagcttccttagatgtccgcgaggctttggccagaaagcctcgatcgcaagcaaaggattttgctgcaagttcttgaaaaatttccgcagaatatagttgatacaggctaaaagatcctttgttgcctggccagcaggaagagttctctgatcttctaaaacccgcttgaagacctcaaaacccgagacctttttcattgcagtgtcagccctgttcgcaaggtgtaccgtgtcccacaaacacattctcactttgtaaaagaaagcgtctgcaccaacgctgaccacgattcgatgcataaggctcacgagtctcttgagctttttcggatcgttgaattctcgatatcgcccaaggtagcgtatcaaggtagagactatccgttcgtctgcaagcgcctttgattgtccagattcggcggtcaacacatgacactgacaccctggcagacctggtactgacataccttctcgaagtcacggaattgccgtgcatgctcggtatacgtagctgtcgccttctcaagagctgccgcttgttcctcttcattgtccatatccacatcgtccggttgtttgttttctgtcgcacagacggcccttcgattagcgcaggtgaggtggctcggaagtcattcaaggacttacttttacgcttattcaactcgcgtttcttgcgaatatgaatctggccgccgtctttcgagtagacttcgagcgttcgtatcagggtgtagcagaagttgattgctgaatccagatatctgttttcggcggagtcgtcgcctagtcagcaactactcaagcggcacaatggatccgaacttacgccattgattgctgtttatagatcttcagacaatcataagctgtctcgatgaattccgcgttttgcagcaatttcgcggagagtgtgtccgagagctcgagaatctcctcgtccttgtcattagacattgcgccgatgaccagcaactgtccagcagatatgtcagaaattgccacatcatggagtactggctcgatttaccaattgcgtgaagaaatcgagacaggcttgaatttccaaatctcctctcggctgtcgtcatcgaatggcttcgaaattagaaaattttcgcttgctgaggccgatatgatcttaccttcgcgtccttcgcttcgcctaaccgccgaccgagccagcctctcgtttcatcctgaaacacttcggctagcaatcgaaagtcaagctcagaatcgtcttccgcgacttcggtgtcattatgttgagcttccgaggggacctggtctagctctgccatgaatgcgtcgtcatcgaatcccaagtctgcgaaagggtcgcgagacttttctgcttgtcgtttggagagttcccgctctctctctcgctgtgcctttcggtcttggtcttgctgctgaacagccagaaaatactccatgaagaatcggcataggaaaaggactctgagattgtctgtatctcggatttttgccctgcccattcggatatccttcagaatgctatggaaaaagtctgcacgaccgagagtccattaggcagatctcctgggctaggccatactgtactcactatcgaagcagtacaggaactgtctggcgaaaggcttcatcactgcaagcgcttcttcagtgagcatcgttacaccaccggcccttattgtcagctcgtcctgcttggtgacctttcctgcgcgtttcctcttgatcccgtcgagaacggccccggctgtcgtggagatggaagattgcttatgaagcacgtagcggtcagatccctatagacgatggcaatgagcattcggacaagagaggcgacgtgtcaaacagccgtgtagactgacagctttcattacgattgtggtgccaaatcttgaatggcgactattgccagtacgcttcgcctgctgtttgctccgatcctcctcgtcaagaagtttccctagcgcttctgcagctacctatgcttgttcggacggctttattatcgatgtcaaatggcctaagtcgcctgagcttacctggctcgattcccttaaaaggtcgtccacttccaccgctctgaacatgagccataacgaatcgagcaccaatacgttgtattcctcgtaatcgcccttcccggcgttccccgccaaggtgagtagcaacggcaagaacctcgattcttccaattggacgatcaagcggctctgcatggaaccgagttccatggtatctcctgcggaaattcctgatccgatcggatccctgattgcgagcagattccgcaccaaatagagcatcaaagatacgatacgtttatccctctccgtccggtcactaagtaaatgaggttgcagcttagtgacgaatgtctgatgttgggttccgacgaaactcaccgaccggacaaggcaagcgatgggagcaggagaaccatcagatgttgaatcgttgatcccgacttgagtatcaaagcctgtgccatcaacggtattcagttaaggacgtattcaatgcactcgtagtttctgtaccgactgttcactaaccttgtactccacttgacttcgaagcaaactagcatagtccgttacgactgtttccgcatcctctagcatgtccttgagctcttgctgaacatcgatgggccacgtcagggcagcgagaagatctgcagctgccaaagccatttttcgaccactttgtccacgcccagtgcattcgtcgagcaaagagacgagctcattacacaagccggctttcgcaaagcatctgaatactgtccgctcgtcgtctgtgtcgtccttccgccatagccgcttgagatcccgcatgacggcgagtgccgagtcaccaggacggtacaccgtctctacctcctgtgtgtctgggttcactatatcctgaaaagggaaaggcggtcgatccctatcagcgtctcttgacgtccgaggtcagactagagattacacacttcgaatcctcccagagctccgaccaagcgttgtacgacaggcatgaacaattccatcctgtcgatcatttcttcgccaccttcttcgtcttggtcgatcccgtcgtcctcttccaccccagtagcctgtcgatcatactggtcggccagagctcttgcgctgcttgcaaagtccatgtcgttttttgctccgcctagaactttggttgcgagaagctctatgtctgatctgaatctggccgtagccgtggaaatagaaaccctcgagactgaatctcttgagatcctggctgtgacctttgcttatgcggattcgtaaccagagttcacaaagcggagcaggtaactgtctggggtctttgggcctctgttgatcttgtcaacagctacatcttgtgatgctgtccgcctcaggtcgatcgcgtcgatttccaccgaacgcgacgcgtcgcaattcatttgattgacccgttcaactcgcccgctcttccttgatcctgaatcctgaacgatccccaacgagggaaggttgctgactacgcgaacttcgacgaatcccaacccgttatagattgatgacgggagtgaagtcatgtacgctcctcgggtaacgtcccattcggccctcaagcttgaaatcctgaacgggacgagcgctttgacacgctagaacctttgctgcgcacaatcactaatattgcatgatagcgctacccgccgtaagtcataagtcatgtctcgcaatggctgcgatgcagtctatgaatacacgcgacttctaatgggcctctccgacgactgccacaatcatgcaccggtgtataaaaacgattagcagcacacttgggggggaagattggaatatcggcatttttaacctcgtgtcaattcaggcgaatgaagtttcgagcgaagttagtttggtaaagtccggttttactttgactgcgccgactggtctgcggtcctcgagaccaccagcaatgcctctgactgtcgcggacacttgatctgacgagagagccataaaaagacacgagcgttcgagccgagaccaaacattctctttgttaaccttgggaaacccatcgcttaaaagcgtcaggcaaagtcgaatgcaagacgctggatcgatgactcgttcagcccatggctcggcgaagacgagaaaggctgtcttaggatgatctggttgtcgccgaccatgtacccgtcgacgatgaacgagatcgcaatccccagtccattccggaaggcctgcttctgggcgatcacaacatctcgctgtgtagacggccggaacaacccgcaagattggaaaccaagagaaggaagagaggcattgattgttgccaatcgttccaaaaagcctggaacggttggtactagcgtactagcgtacaagcgtccccgaccgctcccgtgacagcatcctcccgcatgtccttcctccatcgtcgtgtcttgcgccgagaacctctattccactccaattctccaaaatcccctcggcttcccattttcctgcagaccggcgagccctctcaagcggctcgtatccattgtacacgtctccggtgttgcattcttcgagttctgaggtgatgtcgaatggtgaagggaaagttcttaacggagacgactacatggtcacaaaaggaagcgacgggtcagttgaccaaattcgcttgccctctctcctctcaaaggcagagtctcctccggggcatgaggtcgtctccttcgtgcggtactcaccgagcctccctctcggactccaaaagagccaagatgtcgtcaaccttgacgggtcccttgacgtttcggacaatggatcgcgagctgtcgtccatgaactcgactcggacctgggtgatacctcctcgggaaccggttcgtccgaggacctaaagaaagcgggacgtatatgcacattagtgtgcaatcctgtgtcaaggctgtgcataacggcaaaggtctggcggcaaagggggcatttcttctgggagcgtttcaagtgatcgatcccataatgatattgacagtcgtgcatgacgacgttacgacagggtcgatgtcgggtcgaattccatgcgtggtcctgttgagacctggtggagatcgcccatgtttgtcggtccttccttgcttgatgatggcactatctatctcagtgctagcatctcgtctgcttcgcattcgacccatatagcctgccgagatgatcctcttgatgtttcgcatattcctccatagatgccccctctgcctgtgaacccttgccgtctgcgtgctatccaaacgtaccctggtgaccttagcgagcttgacgggttgcttctgaacgttctcctattgatccgtaaacgagacccaggtcaacatgacgctccgaacgatctccaactcgtggtgcagccatctgacgtaccattttgacgggcttgaagtaaaactctgctggtgatagaactacgtcagattgccttgtcaacttcgatctatttcgcaggtctttctgacgaggtcatcgtgagctagggctgaggtggcctgagactcgtggtcagccaagcaggttcccttcctcgtatcgtctcgcgcgcccaatcttccagcaggacgcatacgttcgagctgaagtcacgcgggtctcggacagccaaacagaagcgcgcgtccttttccgctcatcgcgcacgcgcttctagatcgcggattattgcaaattatttccgatggtgaatgttcggtttcaaacccactctgaaacgttgcttttgtcgaaccgagacaatgcgctgggtcttccacaggcgaatccgtgtaccagctcctacaaaagtctgcgttctctggagtttcgcacgagcagctcgttgggtaaatgcatgcgtgtgacgcaacacctgataaagcctgaatgaaacggtaatcttcaatacttgaagcgggaatcctcaacaagtaaaacactggatgtataatatgggtaatggaatgctttaagggatacatttctaaagaatcaatctatcgtctaagatgtgcattataagtttgaagaagaagcagagcaaagatctgggaggagtgatacagctggccagaacaagtctggcatccgccctcctacgaaggagaaacggctcggggagaacgctctcggaggtaaggtccgtactgtcagatggagttcatacgtcagtattgggcccgatgcaaggtccatatctagtgaccagccaactcacgtagtagagggcgaaaggcaaaggcaagaagagcagggaaacgaatccaagcaacgaggtaccccaatcgaccttgaggttgacgaacagcccgtgagcggcgaggggcattccggcaccgaaggcactcctaatgaagtcgttctgttgttgccgatgcgtcgtcagctgggcgttctagaaagaggcagaggttatcactcacagatgccaacacactggctgcatcggttgggtaagagtcggtgaggtagttgatgatcggattgaacaagcatgaagcaccgacgccgaagatggccgtcgagacgacaggtgccatccagtgagttcggccgctcgaccatgcgaaccagaatagacaaatgggcaagcacagagctccgatggtggccgggattaaacgcttctcaggggcgatgtggccgttggtgcggtcgaactcgcggcaccagtaccacctgcgaagtaggtaatgatcagcattgttgttcgggttgcggggtacccttttttcggctcacctgtgccatgcgcagatcccgaggtatccgacgaacgatccaatgaacagggcgatgaaggggagctggctgactcccagggagaagccgtacatgtcgacgtaaacaagagggaaagcctcgaaccaggcgtaaagaacggcgtaaacgaaaccctgcgatatcaacaacgtctgtcagctacgaatggagcaggatgaacccgcatctacatacgatgaacaagttgttggcgaagacgaccggctcggcaaagttgaggacgaaaggcttgaccagggtcatcttcgcagcttcaccgaagctcatcttggattgctcaatctcgccttcagacttgagttcttcgttgccggtgagctttcggagccgagcagctcgtcggtagagaatgttttgagacgaggtctgttcgacaactgcagtttcagtaaagggttgtggggggcggcggcaagaaagagatcgactgacctccggcatggagataaccaagaagaggagagcgccaccggcaagccacagcatgatccagaaagcccatcgccagcttttagccataatggcgaaaccagaaacaataggaccaagactgggacctgggttcgaaacgataggtgctgaaatcagcttggaacgattcgtaaagacgtagaccaatgcttacctcctgacgcggccactccccagatgcccaaggcatatgttcgagccttgatggaatacatatctctgaccaaagcacacaggttgcgagaacatagtttagatacagatcttcagatcagacggatgtgtaatttcggactcactgcaaggaggcacctccagtggcgagaggaggagaaccgaaaaatccggccaagaacctcaagacgcagagaccagcaaaattgtcgacaagcgcggtggggacttgtaaaatgacgaaaatggcgagggtcaagatgtaaggcgggttccttccgatggcggggatctcagtcaagggggaccaaagaagaggtccggttctaaaatcaggcgtaatgatcagctaccagccaagtagctatcatcggtcgaagctagcctaactcacccgtaaccagcaacaaacaaagacaaactcaaggtggcggggacttgagcaaccttgaggtcagtcattatgcccatgataccaggagtgacgatactggatcccatgtacacagcgatggtgatgaggcagatacagaaagtcacgtgcagtttcttaggcatggaccagttctgagggttctcagggtcgtctacccagtcataagacgcttgaatcagtcgttgaatcttttctgtagagcgcagcacccaggctcaccaggcccgtaccaagtcacgatgttggggttgtcatcatcgtctttcaggcccagagcctgctcctcatcctcgtcactcgtgtccacgcgagtagcactggacccgtcacttcgacgacgtccggcttcgggctgaccgagcctaacaggtctctcatcggcgatcgactgttgagcagctcgcttctcggctgcgtcgatgtagccttgctcgcccccggtatgtttgggcacaggggcgatccgtacgggcttctcctctcgttccttttggagctttttgtattcttcctgtgcgcccttcttggtttcgatacgcttcgatcgacgctcgagaagtgccttcgtgtggtcatctcgtcggtaacgagccgggatctcgaacccgggcctctcatcgggatacttcaagaccttcccacccgagaccttgtggatgatttgtccgagaaactataggagacaacggtcggttcaggtccaagcccttgaagtggtcaagttctgtgacagtggcggattgtagacttaccgactctcgcaaattgtccgccatgttgacaagctttgtgatcggcagatggtcgtttgctcagggaccgtttgtttatttgagcacaatatcaacaaacacgccaatgtggggaacaaatattgagcgcatcgacgattcaagactttataactctcggttcttctggcccttcatgcctgcacgcctgcgtatccgtgacctgcacaggccgagcatcgcagaaagggcaggcgtcatcctcgatcgcgaatccaggatcagcgaggtgggaaaaggtttgtaacggggattggagtcctagtgcggcgtgctccccacctgcgagccctgccatggccagacactcaaggtcttggcgatttcgatcgagttctgaatgctttgaagagcgggaatgactttcctcgcaacccgcggcggaaaaggtgtgctggtctctgatcccggtccgaccagatttagcctctacacgtgttcctgtccctcgaacccttgctgacgaaacctcgatgacgaccgaacgcatccccgcgatgatgacgtcgtgtggaggtggagctggcatcatttctgtctacgcgcccgtttcagtccccgatccagctccgggggcgatcgagcatcgttggatcgcgcagcatacggatgtcgcgcgatgtttgagaagtgcgaagccagccctgagctcgactagcgatgacataggcaactcgtgtgagatactgtagctactacaggatagatgggtgtacagaattgatgctcaaagaatgtctgtccttgttgccatgatatggtttcatgcagaaagaccatatgcgtagcggtgtcccaaggcggagagagagcccgatgaggtgatcaacgagttgccgttatcatgatcactgaatggttcagggggatagccatcagcgtcccactgcctgttcgaattacatccctggggactcacgatccggcagtgacgaagacatcaaaccaggcgtaacgatcgacccattcagtcgagtctgcccaatccatcactgtctcggtcacaagagcgtcaatgctcgctccaagccggcggcatctgatcatggaggtgtgaacttacgcgcacgggcataggcttcggccgcctcggcgggacatccggtgactgtggaaaggtcacgacagtccatctcaacgatccagatgggcaacccgttggaagctccgaacaggttgtaccactcggtctgaaaacgggtcaagcaacatcgctgaatggaagggataccaggcttcagggaagtagtcccacttacgatctgaccaatagacttggtgatgtcggtcccgtatatagcgataggcagaaagtcgatagtacagtttcgttcacaagcaacatacaagtcctgttgtgaggggggtccacaatcacgcaagcacatttcaatacgctagcgggtgactgagtgcaacctttcctaggcttacggtgtaccacttcttggcgacttcgatggatccagtgctatcttgagacatgacaggtcctccgatcttgtatacgccgttcatgacattcatcacctccttgtggatcgtagccgcacgttcggccgtaatattggccctttctccgagctgtagaatgaagtgtttgtcaacgagcagcacatgtcaagaaggtcgcgcggagctcacgtggggctcgtatagacttatgacggacgagacaccaaatccccattcttgttcagctgctcggaagccgttgaccgtatcgttgtctccgccgaacaagatgggcacgaagtcgagaacatcgggaaccagatccctcttcgggctccagttccagcccctaacaacagaaacccttttctgagtaaagtgtctgattcagtgagcggaccgatggctttactgaccagctgaccctacttcctgcttgcaagaaatccgctgcgcaatcacctgagtcgtccatgcatccgagccccgctttgccttgtcccgctgtaccaggcgcggtcgcgttgcagcctgaagccacgcctgcggtcgaagatgggtcaggcagacccgcagatgcggtgctagtagacgtcgtgttaggcagaatcgagactccactctccagggtgctagacaccggataaacgtcagttgctgacgaggcaattccgctggtagcagtggaggcctcgacagtgctagttccagtaaccgcgccctgatcggaggtaacctctggcgcagcgccggaagacgtcgtatcggtctgagtggaagcttcctgagattgatacgctccgctggtggacgaagctaccacagacgactcctgcccagtagccgtagggatgctcgagttctggctaacaggatacccgactcccccattctcgtctacggtaagagccagactggccccgatgaccgaagtggccgaggctgaaggcggaacaacgtcttcgggaagcaccgctgagaattcgctcgtaaagactgcaggcggcggcaacgaggtagcgtccacgtcgggactgacgatagttgtaccttcctgcctggttgacgctgcctcacctgtgaccgccgcgacaggaagtcgcgacaggtcgagtccactcgaagtagacatgggcacctcgcggatcaacgtgaaggtggtcgtctccgtgacggtcacttcatttacagacgaagagagatcggtctcgccaacgggagctgcgtgagctagtcgctggcaggcagcaagcccgctcaagaggggtactaagtagtgcgagtgcattctttacggtgaaattgtccagggtggagatgaagggggatagcgccaggctgaggggaaatggattgatattgtggtcgtacaggcgagattagctgagaataccccagagcaaattcgatcaggcaggagatttatatacacattttggaagaaagggaacatcaagttcgtacccgactcgcataaaggcaggcgacgaaacggaaatgggagatcaacaggccatgagattgacgagctgcagcatgtaccgtagtgaaaccgctgcgaaagggtctttcgaaacgttcagcgataaccgatcgcaacgaacgctacagcctgcgaccgcaccggaccacggaaaaggcctttcttggttcctttcaatcggcggctcttttgtggaatgattcacgtctatttacctcctcaacggatgtagatcgccttataatgaccactcacattagctgaaacgtcatccatcatgctcttgtcatatctcgtgtctgcttccagacgatgaatgtagcgatcgacccaggggtctcggctgcggcaattcctttgttgagctcaggcaggttctacgaggcgggatcagccaggggcagcttccgggccagaccccgtgtctcgcagtgcggcgagtggcgaggcagcggccggagcgcggctcttgtttcgtgacgtcagccaccaaagatgtcgtaagcgccttcccgctctctcttcttcaggcaaatcgaccgcgtcatttttctcccgaggcccagtgggacgagagaaccgggacgagacgacgatcagattgggaaatagacagcctcgccagtcggcctacttcaacccacaagagggaagtctggatctataagcaaaagaggcgatcccatctacatcatccctctccaaaacctcttttccatctacgtgaacatttgcgaaacttatataactttaccgtgagtgaccgctacatgggtggtcaggttgagaaaaaggtggctgaacacaacaacaacaacctactttttgttatcattttactgtatcgtcttcccgccgcataatcgcaccttgcagacccttcacccactcaatcaatctcacactacaacacaatggttgacgccgattcatctgtccgacggggccaccctggtgagcttcatagcacagtgtctgcattcgctgccagcactgacatgaatgtgccgattcttcacctgcagttatcttcggtcttgtggccctcttctcgctcatcgagatgtgtattactgcctacttgacctcgaggtacaactcgaacggataccccagcagtcacttccagggaaccatccgattcggtctgtgagtcaccacatctcgagccacctagacgctcagcatgcacttgctaatcaattttatgtaccagtttcgtctcgatctggaccttgttcttcagcatcgcctacttggccatcttcttgactggtgtccagaactttatgagctcgatcgcttcccacggagtctggctcttcattacgtgagttggtatctactcgggtgtcgcggaaccttctgctgacctgcaactgtcaaaatagctgggtcttctggttggcttacgccggatccaccgctgacatgctcagcggtcccggttactgtggaaggcccaacctcgaccactgcacccagaacgtcgctgccgaggctttcgcctggatgaactggtacgtaaacccaatacaaaatttacctcttgtggaacgtctgtcgcttacgctaccgtttctaacttatcaggattctcctcaccctcgcctttgtcgccgttgtcctcctcggagtcaggtcgatgcgcaagggagagcgtatctctggtcccttgaccgcctaagcaggcattctcctcgtcggaaacttcatcgactcactataatacacaatctagaagagaatgaaaacgctccaccgaatcctgcataagaaaccgtgaagagaaacgtcaggaaacgagctgcaaggcgacgtctaggcgtccatcaggctgcctacatcgtgcggccgggtgtacgagcggatggagctttgaacagcgaaacttttgttgctttacacgtctgttttataattcccttataatatgccatactttcgcccgaactctgttcatccttcggcttccgtacatgccaggggaaacgtagaggtctcttcggtttactgctacccagcaacggcacgagaggttcaggacagagggcaaggtcgctgggagcacatttcgggagtcgcccggacgcacgaccaatgctgcgacgttatcaaatatctagggaaccttggttcgcgttatagcgtccctaactctctgctccgatggtttggtcatttcaagatgctgcaatctggagctgcaatcgctctacttgatgagcccttctaagtttcggcaaccgacttggtttacctagcgcagtccctccgtttgtgactctaccctcacacatgtggactcgaagtccgttctagtaaccattccggatcgtgcacaggagaatgtgcccatacaagtcccagcacgaatcgccattttaccattttgcaggcgatgaccacgttctgcgagataagatggtcggccagtttacgcgccagcggccgatcacgtgtcatggcggtgcagcttgagcgatcagagcatcgttatttcggggtccaactgtaattgaacaatttggacgacctgcgagttcggatcacggtcgcacgcagcaattgcagcgagacccagatttccagccagaccccagtaccgccaggtcttgagcatactggtcacaccaggcctggaatacagtcccctgtgctccatgatataagcaataatctcactgcaagcctgtcttgtcaagatgcctgctgagcgtgacgatcaaagggagcctgccaagcatgccagaacgacttcgactacaacttctgtcgaatgcatatcacccggagctgcatcgagacaccgtgtgagctggaatcggtcccgttcggacgtaccaatcctacgtccagatccgacgccatggtcagtgcgcaacgcaagcggttgtcggaaccctccggaacccttgtccagtcatagacggaacagctcggatatcgagaaagatggcctggagcataggctctcggacgtctcgctaggaccaagtctgtcgtttcatgacatgttcggtcacgaccgcagggccaccggcttctcacagccggtcgcgagttcttcccggctcgacttgatatcgtcaggagaacacagccgtccgaaaagaagcctttcgagcaggaaggatagtctggaggaagaagatccggaattgggattggcaggttctcattacgtcgaccatatacctatgaccaaggtcgggcggtccagcgattcggatgccgagcaggagcaggagcaagtgagggacttgccgtatacatcgtcaaagcgtctgaaaagacggaggactgacaaaccttacgagggcggaatctctcgacgtaattctgtcctgcgaatcgtagacggcatcggttcggtagtcaagagaagtagtaccttgcgatcgacggcaggccttgtccagcgagtcagtcgacgagtcgtaccggtgagacccgacgacagcgacgacgaatcgcgacgaccgttgagactatccatgcatctggatgtcgatccggagagttccgacgaatcgactgagaatccgccttctgatggtcagaccggcatgcccgatcaccgttcttgcccaccaagtcctactgagacgatccgaagatcgggccgtcggtccagtatgactaggacaccgtcggcagggatctcggtccagacattgcctttatcgcacccagccggcactgatccggacccaatgttgaaagggaaatcattggggatgttcgggtcccagaacaagcttagaagagcgctttatcaagccctgaagcgaccgtcagtccacccatggagcgagtacctcatcatcatcctcgctgaccgacaggacttcgtttgtgaccttaggtacaccgaggccgtcgtcttactgattattgttttccacggggcagttctcatctcgcaatcggcacctagactccacgggccgcgggataccagcggatatttccatacctgggaagacacagccttgcttgcgatctttgtgttctacaccatagaagcgatggcacggatcatcgtcaccgggctgatatcagatccagatatcactcttgccgcggttcccggggtgatcgagtcgagaaaagtctctcaaccgagagtgttgctcgaaagactgatttccgggcgcaaacgttccaatcagccgcgtccatcaggggagaaccacctgcagcgcgcattttctgcacttcgtcctagtgccatcgtccagcaacagttccgttcccaacagcagtggagaagcgagaacatggaacgagaaaaacagtctttacattcgctcggtaacgggcgtccgagtctttcggtcggcaatggcaggtcgcacaacaaagcaaagcttttcaacgaactgcccttcgaagctgctctcaaccatcaggtcggtatggttacgagtggccgaccctacttgaggcactcttggcagtgagtcagtgcttcgtccgcatgagaatagagatctatctgagactttagccgctggtgctggatgttgatcaagtcgcatagaccttctatcgatcgtctgcttctggatctcgtttggcttagcctttagcggtcgagaaacgactgtcgatcgtcacatcttcgtcttccgcgcagtagctaccatccgtacggctcgtctcctcctcatcacgcagggcacggcagtgagtgcttattatagcgttgatctcaaggatgaccacggctcagcggcccattgaactctcgtagactgttctgcattcgctcaagctagcaggaccactgctcctgcaagtatcgttcttcattgggtttgtcgctctgctcctcgccatcgccggcgtccaaagcttctctggctctttcaatcgatcttgccagatgtacggtgagtcctcaagacgcgattcttttcgaccaaagtgtccaaacatgaccgttgtaaaatcgatattaaagatccacaccagtctcaaacgatcgatctgtcgaagcagtgtggtggtcatattgatccgttcacactggagcccgtcgcttggacactgatgacaggagagaaccgcttcgacgccaaaggctacatatgcccgcttggacagatatgccgggcaagtcttccctcgatcacacatttaccagagcgatgctgaataaagtgcttgtgctcgacccctgtcaggtcacgagtggcaatcctgaaggtctaggtacattcgacaacatatttcaagccctgttacaagtcacaattattgcgtcttgtaagtccaactttagcagcccaccacatccatggctcaagtcttgcctctgtacagccaacagatggagtccggtatgtattcaccttatcgaatcctgcttgaagagatctgactattgcttatacagataatgtaccagctccaagattcggattactactccagcgggatttttgtcctggtggcattgattctactcaacttctggcttgtttccttgttggtcgcggctgtggtcaaggcatttcagtctatacgagcgacaggcgggagtggcttcggcaaatagtatgtcatgtctcgctcaaaggatgtgactaacgcactgatcggaatgtcatcgacgcagtacgaaagatttccgtaagaagtcgcaaaagccttcgcctatgagccgtgcaggatgcactaaatggatgcagaaaaccaagccgttctggcttcttctcgtattcggtagcatcttggtacaggcgcaaaaagatcatacccggtctagaagggacatctcaattctgggtaagaacgggaacgagcgctcctgcctctacaggaatttctgacaaatccgctctggaatttagataatgtcgagagagccataacagtgctgctcgacatagagatctcgctccggatattcgcctacgggcgcgaatggtctatattcttcgaatgcggaaggaattctttcgacactttcctggctgctgtgacaaccatcctgatggttccatacattcaggaaacgtccgtctatccttggatgacgatttttctcctgatgaggtggtaccggatcatccttgccattccgccattgaagcctctcatcggaaatgttttcaggcatttcgcggagatcaccaatactgttcttttccttttactcatgacagtttctgcctctttagtcgtgagtctgacgcataccactaacgggggactacccgcttacgcttccctattacattagggtgtacaaatgctgagaggggatatcgaccctgagtcgacccaactttcctttgacggtatcctctcttctttttatgctatgtatcaggtaaaatccactctgagcgcgttcggttgggcgaaggctcatcttgcattcaaagctgatgttacttgagaattggaccaccgtgctgggagatgcggtgagcaatccgcattattcggcgagcagcggagtggtcaggctagctgacattccgccctcagatcactgctggccgagattacaagcagacggtcctcttgtccattctcgtcatcggctgggccttactagcaaatttcatcttgatacaactgctcgttgcagtaatcaacgaggtgagtcatcaataaggcatcgatcgctacctggaagatcgctgaatcgcgcggcgtacttctgattccaaggcctttgacatatctgagaaagagaagcttgagcttcaacagcggcgcgtagcagaccgcaagaagccgctgatgctgcaccagaattggttcgagagattgaacccttaccgactacaagctcctcaaccgcgctctacagcgaaaccaagaaccatcaatgatgcgcagctggagactattattcacagcagctcggcaagcgtgagtttcggaaactccggtacccaccacgtccaggctttctgatcgattcgccctagtagttacgtggcatttggtatagcctgctgtgccgcgcgaggatatttttcggtagtcctggtgggcagaaacctagggttgagcaaagcgcaaatgggctgcggacattgcagagtgctggcttgtgagtagcttattagtagagcaaattgacccagactgaatatttcaatttgcacaggaatcaactgctccgccgtaacactgatccgggggtgaacatcaccgaagaggctttcaaaattcgacgcaagattcaagccgagttcatactcgatcatcccggatacgacacgtcactctttctattccctcaaggcaatctcgtcagggacttctgtcaagcttgtgtgccttgcctatatgagcaaaggcttttcggacgccaaccggacctgaggagatacatactgcaagtgaccgtgttcgctgcgatccttgcatctatagcaatcgctgcaatcacgactccggcctatcgccaggaatattatagcgagaacggtttagtccggaccagttggttcatgatcactcaattggtgataggggggattttcctgatggaagtcactatcaaagtgatagccgatggctggttcttcacgccgaatggttacatgcggtccttctggaacatcttcgacttcttgcttatagcaaccttcatcggcataacaattggtgaactcatcgtctttgccggtatgggtcggaccgcgcgagttctcacagcgctgagagcactgcgtttgatcaccttgtctcgtcatatgagagacgcgttttacaacattctttacggaagcgccattggactattagccgcgtccaccattatgggactctatctcgttcctttcgccgtttggggccgcaacttattctctgggcggctttacgcgtgcaacgattccaccgcgagcgggaaagctgattgctatggcgaatatatcagtacgcctgtggacgagtccttggggtttctcgcgcctcggatctggacgaatcctagtccagtcggttcggaatggagtttcgacgattttcgttcttcacttcttattctgttcgaatcggtatcattggaaggctggacagatgtgctggcatccataatgaacatatcagaaaaggatgctcagccgacaatgaatgcgcaacccctcaatggattgttcctcatcctcttcatcctgtttgggtctatcctcataggaagctccttcatcaggtgggtgacaacttcgtcgccttgtcattttcagtcatctgatagtcattcctatgtagcattctgattactgcctacgcaaagaacaatgggacagcctacttgacaaatgcgcaggaggactggcgagcgcttcaagattttatcggacagcaaacacctccaattcgacccggacaacagacagggttgcgagcatggtgtgcacagcgagcgatcagaaagcacggatggtgggctcgatgcactaccgccgtatacatcgcgcacatgcttttgctcctgtgagactcgagctggctgaagtgtctagtgtgttcgaatcactcatactcataaacatccagcctacaagacgaccgtgattacgttgtgtcttcacaaatttcgagtaagctcgaaccatgtgatataaatttcgtcagaaatccctaggctaaaccctgttaacgatatagattggctgtttttcatgatcggctccgtgctgttgctagacgtcggtctgcgcctatatggtctcggtgtcaaggtctttgtgcgaaattgggcgtccattttcgatgctatcgtactcttgggaatgcaggctacgacgattcctttcatcattcacagcgaaagcgcttgggaagtcagttgggcaaacttccagcttcagaaggcaagtgcgtcgttgtaagcccatgaaactctccctgacatcgttcgtatgcagttattcctcacgttactgtgcctcaagctaattcaacgcaacgatggactgaatctattgttccgtacttccatgtgagtattgatttagggttcgagctctttcaatgactgaactcgaaccctgcataatgccagtgggagtctggctgctatcgggaagatcctttgtctctgggctatcctctttgcgacgtttgcacttgcatacgtacaggctttcgggatgaccaaaactggaaacaatgcggcgagccggttcgcaaaccaccgaagttgggggaactccatgttagccttggcaaccgcctcaactggagaggcgtggaacgccaacatgcacgattatatgctggagtaccctcgctgtcaggagaatgattcatacctcgtcagcgattgcggacatgagacatgggctcttggattattcagcatttggaacctgatatcggtgtgagagtcgatacccgccgacagtctctgaccgactgaccatgattcttttttaggtatttaatgctcaacgtcttcatcggtgaggagaagatgctctcacataggccagaaaaactctgatcttccaatttaaccggaatcagctgtcgtagtcgaatctttcggagtggtgtgggggtccaaacgaatcacccggtcatccatgcgtaagtttgtatttgtgattttattactggtggtagcgaagtgatggacatcccatatgacctcttctgcagggaaatttaaggacgtgtgggctcaattcgacccgcaaaggaccggattcattgaaaacgcccagatagcgaagtttctacaggtgagatccgtgcgcctatatacggatttcgaggcggttctgaatcgtctcgggtccggtgcggacataggccgtaccgaaaccattcgacgtcgcgtcacaaaccggcgaccacagtctccggggtctgctgaagacgtcgaagccagatcctgccccacggtttgcagttcgcataatttcaggcgccaaaacagtcatcgacattgacaaattacaaaaggcattggaggacctccagcccaccaaagcacgatcgcggcgaaatctatggagtcaggtctttcatgaagcttgcatgtgtgcctcagattcacgaggcctggctttcggcgaagctctaatgatactagcccgccggaagataatcagtatggaagacgcctttgagtgagtagctggagagtaccctgtaaatcttctttgctcacaaagggccttccagtctggacgagttatccggtcgcgctaaggttgaggcggagattcaagacctgctcaacctcgaccgcgtgcgttctctcttgcgcaaaatatattgccaacgcagatacaaggagatgctggtcgaacgtcaatctcgttcagctcccgattcccgaggtacttattcctggcgtcggtcaagtgccagagggatgagctgaacacttttctattcagacattccctctgttgtgcttgatcccatcgaaaccaacattccttacaacagtgcccgctcggcgggaaccgactcgcttctggcaccaatatctccttcatcaccttcagtatggactcacgtggccagctctatagcatcgcgcgacggccaagtttcaccggctgtcgagaccttcgaatcccttgctcgtaagcaaccgcctactccaccaccacggaccgatcatgaagctcccaaatcacacgatcgaccccattctgacgtaggcctgcagccattttttaagcctactgaacagtaggtgtagcgtgaccggatcgctcagacctatgcgcgtcaaattcatgacttatttgatcacagcttcaagcgacgttcacatgcaaattacgacccccttgacgatccgaaagattctgacgatcttggcactaagaccctttgaacgatcaacatgtccaacctgcaatacaggtgccgtctaaatagatgtcctgtcggcccaaagcgtgtaaatgatgaatcgcaattatcccgcgaatggtgtgatacattcatgatctacgagtcagctcgcttaggctttgactcccaatcgacccataatgacccccttggcaatgcccctctgcccttcgctgacgttggcgccccgagcgagcgcaaagtcggcctgatgcactgcgaaatgatgtagtgtatcgcggttggttttgggatcgatgatcgagttggtcgaagagcccgtggactgcgcgaaaggagcgggcgacaaatgagagtaagatccaacagcgaggagggcgcgatgaagagccgaatctgcgagcacagatgaccgtcaatattcgatgcagagtgctcgatccggtttggatggaggaagctcgactcacctcggtcggccgggacattctgttcaccaccgacaaactctgcgttctgtccttgaacttggtccatactggcaacgtcgacatcgagtagcgaggtagtcccgaagagatcgtcttgccctcgcggtcgttgaggagcgtaatcctccaacctgatctgatgtacagggggttcggcagccataggcttcacccggctgaacttttctcgaggttgttgcctcgactggtctccttctttcctgaacgctcgagcagctccttggttgcccggtccattcctctccctctgtcggttggcaccttcatacctcgacgatgcgcctgatgaggatgatcccgcagaggcagccttttctttcctcatcatgccaccaaatccgcccgccgccccgtcttctcgcttgtacaatcgctcagctctctttcctgcttgaatctcgctgggtttgctactgaagctgacggtctctcgtcgaggacgggttcgcccttcagactttctggcgttccccgagtctgcatcgaaagcagcttgtcagttaggctcgagcaacggtcggcgtttcggatagagggaaactgactgctgtaagacgccgcgacgggaatacgtagctctggtggaatttcctgcatgaggtcttgcatggtcttgttgccgatgtctgctgctgctcggcttgaggagaaggaccggacccctgatactacgcttgaggtgcggctgagcgcaattttcgtcgaagatgtccacatgttcacgatttggtgctggattgatatacggagaatcttcagggcagtccggagggttttgtgtcgcgatgacgatcttgggtctagtagctagtagtatatgattgacatccttgtgacatttcgagtgaaagtaaggggagcaagggccgctcgtttgcccgtttgccgcgtgagaaaatgatattcgcgtctctcgagagcgaggcagaggcagggaggaactcagaccaggccaactcttagatgaagtagagttcaagtgacctcgcaacacatgatcccagggcaaaatcatcagctcgtccacataacatagaagtcctagcaagagcttagataccaatacgagcgaacaggaccgctcgcttcccccccaaaagcgattcgaatcggaatcggagaaaagcaacgtctcaggcactagcgagacacgttgaaatagagacgactcgaatctacagcaatcacgtccccacatacacagaccgttcaagatgtctatggaggactatgatggtgagggcttaatccctcttctaaaagttgcggggtgaccacgacactgaaaagcacgctatctggttcgaccactctgtagagtttggtaattacatcggcgccgatctagattcggatgacgatggctccgaggtcgagattgcccagacctcgacttcggcccagggtcaaggtggaagtactggacaggctcaagctcctctagaaggttacgaagatgacgaggacgccgagatgatggatcttgatcctcagaatgcggtcatgcagctgcagacgatggatggtgtcggcaccagtcagtcacttcctccttgctggcctatcttcaagtatagcgaatctcacctagagatcgctcgttcttgttgttacagatccgcgcaatcagatcgtgttgcacgaggacaagaagtactaccccacggccgaggaaacttatggacccgatgtcgagactctggtgcaagaggaggatgctcagccgctttctgaaccgatcgtagcaccaatcaaggttcgaaagtttgtcgagcaggaaaaagagatgccggtcactcggtatgacaaatcgtaggttgattcgaccgcgacgcttcctctccaaggccaatactcactgtcgcccatcccatgaacaggttcatgctggatctgatggagcacccttcaatgatccgaaacgtcatggttgccggtcatctgcatcatggaaagacgtcgttgttggatatgctggttctcgagacgcatcaactgacttgggatgcggatgaagcggtgagtgacaaactgatgacaaacattggtcgacccgtcatgctgaggcggccatgtcatcgatcttccatcctcgtcagattcgatataccgacactcacaccttgtctcgatcgagaggcatttccgtcaagtcgaactcgatgtctctggtactgtctacttcgcggggcaaatcccacctcgtgaacttggtcgacactcccggacacgtcaactttgtggacgaggtcgcaagcgcgactcgattggtggatggagtgcttttggtggtcgacgtggtcgagggtgtgatgagcaacacgacggaaatcatcaagcatgctatgcaagagcgattacccatcgtattggtgttgaacaagatggacaggttgattttggaactccggcttcctccttcggaagcctttttcaagatcaaacactcgatcgaagaggtgaacgccgtcattgcgtgagtcaggtcgtctaagcgtcgtcgacagagagattgatgtcgcgcttgctatatcaccagatcgattaacccggacgagagcatgagaatctcgccagagcgcggcaatgtcgttttcgcatcgacccagatgggttggagtttcacgcttcagtctttcgcccagctctatagcgatacctacggagctgtcgacgtcgatgcctttgcgatgaggttgtggggcaacatctactataacgaggagaacaggaagttttcgaggaaccctacggacgctgagacgaagcggtcatttgtgcatttcatcttggaacctctgtacaagctctattcccaggtcagtgcatgccgctactacagcattcgtgcttgtagatcgcctcctgattagatgtggcttttccttgtaacaggtcttgagcgaggatactgagacgttgaaggagactcttgccaagctgaggatcaccctcaagccggctgcatacaagatggacgtacgtccgctcttgaaggttgttctggacgccttcttcggtccttcgaagggtcttgtcgacctcattgtggaaaatttcccctcgcctctcgaggcttctcggcaaaaggtcgaattcaactacactggtccgcaggatagtgaagcagctttggcaatgttggcctgtgatgcctcgggtccttccgtggttcacatcgccaagctttaccacaccgcggatgcacaggaattccgagcatttggacgagtgatgagcggtacgatcaagcaggggcaagtcgtcaaggtcctgggagagggatactcgcctgaggacgaggaagacatgactatgcagacgatcgacaacatttgggtcaacgaatcgaggtaagtacggcagttttccggatgagagctcgagtctcacaatgaccttgacagatacgtcgtcgagacggatcatgcatcggctggtaacttggtacttctcggtggagtcgatgcctccatctctaaaaccgccacgatcgtatcgaaggagatcgatgacgacctctacattttccggccgatcaagcactttacccaatcagtcttgaaaatcgccgttgagccgatctcgccggccgaattacccaaaatgttggacggtttgcgaaaggtgaacaagtcataccccttgctgaccacaaaggtcgaggaatcgggcgagcacatcatcttgggcactggagaactctaccttgactgtgtcatgcacgacttgcggagactgttttcagaaatcgagatcaaggtgtcagatccagtcgtcaagttctgcgagacggtcgtcgagacttccgcgctcaagtgttatgccgacacaccgaacaagaagaaccgtctgaccatgattgccgaacctttggagcgaggcttggccgaggatctggagggtggcaaggtgaccatgaagatgaccaacaaggataggggcaagttctttgagacgaaataccagtgggatctcctggcgagccgaaacatctgggcgttcggtccagacgagcaagggccgaacgtcctcgtcaacgatactcttccatcagaggtgagccacaggatttactggacagtcattgtcaagcaagccatctgatcgtctcatcgtttcttcacaggtcgatacaaaattgttgactagtgtacgagagtctatcaagcagggattccagtggggtacccgagaggggcctttgtgtgacgagcgtgagtatcgcccttgtactctaccaagggcggaaagactgagtcatcttccttatacagccattcggggcgtaaagttccgagtcttggacgcctcgctggctcaggagccaatataccgaggtggaggtcagatcatcccaactgcaaggcgtgtctgctactccagtttcctcttggtcagtctagctattcaacttgttgcgcaaaacctcggctgaactgaacttgacgctcaggctacaccacgattgcttgaacccgtctattatgtcgaggtgcaagcgccagcagattgtgttgctgcagtctacactgtcctggcacgacgtcgtggccacgtcacgaaggacattcccaagcccggttcacccctttataccgtacaggcgttcatcccggtgctggacgcgaacggtttcgagacggatttgcgaatggcaacccaaggtcaggcattctgtcaaatgcactttgaccactggagcgtcgtacccggtgaccccaccgacaccagtatcaagctgaggccgctggaacctgctacgggacaagcattggctagagatctcgttttgaagacgcgaagaaggaagggattgagtgacagcattgccgtcagcaagtatctggaggacgaggtgagttcgggtagtcttggccgtcttggtcattttgtatgcatcaaagacgctaactgtatgtggcaatgcgcccttttcagaccatcatcgctattagcgcgagtggtaacgcggatctcttgggttgaaatgggataatatgacaccatcatcatgcgctgcggtgggcctctaagtcacctcattgtaacatctgtatctcatatgctcacctaagaggatgcgcaagcgacaccatcgtgaccatgctcgtgacgagacaagcaggcaggctgaccgcaattgcgatattgacaatggacgacaatgcgttcatcttcgtggatggcgcaagaaatgcgtcgctcctcatctgacgacatgccccttataaaatcacacctactggacgaacacccatagtgcctgcaaagcgtactgtactgctgtgaccgcacatcggatatcgtcatgaccgttcgaggattgagtcaatgtgtcaacgatcagggcgggtgcggaccatccatatgatgttcccgaggctgacgttgcaaggctaagtacctttgctggccgcgaaccataggggttccaccatctcgaggactatctgactgtcatgcctaggggctagactattggccgcattgctcttgattgactagggggagataggatacaggcgagtgctacccagtagcgcagtgatggtccgtaggtaatgaagctgttagcgagacgacggaagcgtcgagggcgagaatgctgctttggaaagcgagatcagaagggcagttatccgcgatggtgttagaagggatgagattagattccaacgtgaagccgagcctaacgaaacaaacaaaggcagcatcgggtttgatcgtaccaggcgtaatataccgtacgagatattcggcgttgtgaacaaatgcaagacgagagatagtgagggttcttgaccggatggacgctttgagtactcttcgtagctgttggcaagaacgtccggaaggtgccgggatggtctacctgccgtcccacagtgacgggaaatcgagtcttattctgaccagggtcgtgacggtgccatcaaagcgatacgagttgataatcatccaccattttccatcttgaatccgaaagggaggcgggtatgatatgtttgaatccatagcgactgctctcatacttgctacacatacaacggctacgtcaatctttgtcctggccgtccttggagagcccagatggacaaggaaaaaccagcgactggttctcatgagtcgagatgcgatttgcgatccgacagaccagaccggacaccgcatccagatggcaggatacagtcgcatcgattatgaaacgccttaaacagtcaattgatactcgtactcgtccgagctgctttgggcgatccagagtatcaatgagctgctcggacaggtcgatcgataccaccacggcgaggaagttagcggatcatcacaacacatcgaggggagatgaggcaacgctgactgacctgagcatgagtcctccgttcatccctacgttagcggctccatagtaggcgtacgcgttgtagccggggacgagatatttgaggatgagaacggtctacaagtgcggaaatgaacccgggaacatcaccgagcgtgatcgcaagaaaggtaaaaagcgagacgaacgaatcagtctgactttctcgtctatctatcggtcgggcagcgtcacggttcaaaggcttaccaggctaccggcgaatcctccagctagcaaagccactccgacgaaaaggaccgccctagctctcgatgcgaccgaaccttctgacccgaacgagtcggagttggaggtcaggtgggtcttgtccaggatagagatggtcaggtagccgactgtcaagagcgacgggtttataatcgaccagacgtcagcggatcagagtatttcggtggtgagagatacgaggtttgagactcacgtgtactgaagatggcagggatccaatcggtaaacgagatgtgaacgggtacggtatcatagggagcgtcaggtggaggtttggcatgtgacgagatagtggaagcgtcgatcaagaggaagaaggaggccgcgaactggtcgggccgataaaggtgccgaatcagtgtgagtgaacataaggtcccggatggcaggtaggtaatagacgtacgagaccgccggcgaggtaggtgccaatctctctgcccttgccgccaaggttgagcttgggcaggttgaagaggaagatccgacggggatcatatgacaatcgagggagtccggacgacatgacggtgaatgaggacgttacaaagttgatgcaatcgagatgtgttcgtgcagcggggtaaagatggtgtgtaactgaggaccaactcgttcgatgtttcgccgtgaaagggtcgacccccaggttcgtcatctccgagccatgagggttgatcgaatcgaatcattgatcggattcgtcgagaaatggaaattacacgtcacgtataccgatatctagtgcagaaagtgataaacacgagaatgtgcgcctgacgttttcataaacaaagaatcgatcggggcgtttccaggtctgattgattacggcatcgtcacagctaaatctagcgtgtcgccggctctaccagacggtttgttgtgatgtcgcgtgccgagaacgggggccagactagtgcaaagtgatatttcacgatcatcgccgtcgccgggctcaattcccagggcagcagggagagagacgaggtcttgtttactttttcatttcccaaatttcacgcgtgaaagcccaagggcgagcgaggggatgagggcgaagggccgtgatcccatcaaaccgcatcacatcacatttctgatgtacacacccacacacagcaatttctagggggacgggggacgactatataatcccatcaaccatcatcatcaccctcctttcttcatcaaaccccctcgcccctaattttccttccccttttttcaactagcaatactctcttatcgaccttagccttaaacgactacaaacgaactacacagtctttacacgacccatctcatcttcaagagaaacctctagaccttttcaaaacaaatcacaaacgaattttcacaccacacgtaaaaatgttcttctccaagctcaccgccgccgccgtcttggccgtcactggtaagttctctgacttctctcgtcgtcctaccatcgtccggccgtcctcgccgctagcttgctggagtcatcatcgcgatctgccctcttttggcgacgtgatcgagctggtggctcgtgtgatggtgggacgagaaagaccacgagctgtgatcctctcttccatcaccgggacatgaattctgatcaactaccccacattcacagccgtctctgcgcagatcaacacccctgccgctctgtaccagtgccagcctattcagatctcgtgcgttgcatctgaccgttcatctgtcagctcgatcaattgtctgactgcttgtctctctctgtatgcgccaggtgggcacctaccaccggaccttactacctctcggtcatccccggaagtcagcccagcgccgctcctctccttgacttcggcgaggtcgtgagtacccgtcttcaagcccgtcccgtcgacccatctctgatgttgcgtcacgtccgtctcgtagcaatcctctcctatcacctggaacgtcaacatcaccgccggtacctcggtcgggttcgccctcgttgactctaccggtgtccccaagtacagcgatgccttgaccatcaggcccggttcgtctgacagctgtctgtccgcttccggtagtgccgccggtgctgcgtgagttgcatttcttcgttgtcctagtcgtcccacaaacgatcagtactgacagcgatctgacattgataaaacagcactggtgcctcttctgccgccgcttcgggtgccgctacctccggaggagtcgccgcctctgcctcttccgctgcttcgggtgccgcctcgaaggctgcctcggccacctctgccgctgcctcgtaagttggactgcgtctcttgctcatgattgtctggacgatgggcttatcatcaatcgccccctttgcagcaacgccgcttccggtgccagccgagctggtggtgccgccactggtgcctctaccactggaggatcggctgctcagtcttctgcccctgccaacggtgcttccaaggtcgagtctgccggtctcatggccgcggccctcgccgtcgtcgtcgccgccgccatctgagcgagcttccacatctctttccgacttctcttcaacccgatcaatccctttgtgccgaagacgtaccctggatgggacggtacttgcgccgaccgggtgacactttacgggcttcacgacgaaatgaccatggatctggacgctttcttaaatttctgcgcatggacggtttcgagctctctggtcacgttttctcttcccgccccttctagacatatcatgccctacaccttcatcctgtagcctttttttcatgacgcgaagatctctagaccgatcgtcgggttacattctatctagatacatacccttcgcttgcttgccttcgagacccgagttgaagggttctcgttcggtcgttggtacttcgtgacttgcagatcatctcaattgaaagattaacgatatcatcttatcaacaacttgcgcgcgtccatatgatggtggggcgttgccaatcgaagccagtaatgtcgggctacagcagttgttcacgagtacatcgccgagtcagagacaaagttgacgagacttactcggtctcgtgaccagtatccgcccaccctctcaagttgagcgcccgacggcagctgggatagcgtgtacaaaactcctagaggcacacgttactcgacctcttgagaaactcctaacaactcttacctggcgtatgtttgctcaaatcaaatgttgccttcatatctgattaatcattccagtcagcgtctccatgtgtcaagcggactttccgcaatttctgtctgtcatacgcctgctggggctcgggatttaagacctgattatcagccactcgaaggcttatgcgaggcggcctggaacctagagctaaggcagggtgggtgtctgcaatcttcataggtcgagagctaaatacaacttgtcgaagcgatgttgggcatgcagaccaaaagaagcggaatcatcatcaagagagtatctaatatgtgtagaagcatgtcagctggatgctcatggtgcggaaatcctgataccgtcaaactcacagccaagagaacgatagcagccacaaaggcgagaatgagcatgagacataacatcctccgtcctgctttccgctggtaatcgtgcgccgtcctcagctcttcgcccgccgaagtcacgtcattgttgaccgaaacgatgttgctttcgatattgtctgcgacgacgaatgtaatcgtcagccgagatcaagagcatcgatctcttctcaagtctccgcccgagcttaccgatcatgccaccttgctcctcgacgatcttgcccagatctcggaaaatctcgttcagctcatgtattccaccctcaatctccctaatgtcagattctcgttccgcgatcagagattcttggaaagcgagttgttctggcggaatactgtagtagagcaagtcatgtcaaaccgatgctcctatcccctttgagcatagtgaactgaactcactgctgctgctgttgctgcacctgctgcagagccaagccatcccgttcgctttcgccgccgccatggtcgtcttcgtacccaatctgagcgtcctcgaccatatcgcccagcctcttctgctctttccgcaccatcgtcttttgacgctccgctgataccttctgaatacgctggaatcccgtcaaggccgtcgtaaagtctttcgatatcttggtttgcaagggtttccgagaagagccctttgacgaggggtatctcagtggcaagatatcaaagatcacgggcggcaaactcaccccggctggaggttccgaaggccaggatgcaagcttcttgacatcttcggtggaacgcttgatcatggctcgggtagcctccgtcaaattggtgctacggaacaataagcaacggtcagcgttcaagccctgtgtactgatatctcgagaatcctgacttgaaagctactttgctcagacttacagactcgttctcacgttatcactgtcctgcggtgtgcccaacttgtccaccagtcgagtgatcccctgcacattgctttgaatcttgaagatctgaatagaaacactgtccttgagcttggtgaaggcttgctcttcgtctgtcatcagatcaaatgacactgagctatctgcgaacgctggcgactgatcatcaactggaatctatttaccggattgagatggtcctcctgctgatcggccggaattcccgggacccatccctcgctcgagatcgttgaagctcatgttgatgatagctgggtggaatattgatccttaaatttgacatgtaacatatggatcttgaataggcattcaacagaagaggtccacctgcagaagaaagaaaggagtcacagccatcgcccgaggtcgagcattagtcacccgcggcgattacggctgagcgcgtcgcttcaatacgtgacttcatcatttcatcatcaagttgcaagtagttacgtaggagcaagcatcaactaaggcaggtcggaaatgatagggacggtcgttcgtataagacaaggcagagaggctacaattacaaatggtcaatcactaaggaatattgcgacctgaaagcaagagggaaaacgatatatcaagcgagaaaacaagaggactgctcgcgagcatatcgtatccccgtgaattcgataaagcatggcaaaacaggtaatcctcagcttaatcttgctgccggttagagagcgatagtactaaagcctttttggtttgctgcggcggcgtttctttacgattgtgtcgaagcttggctctgccatgctttgtcggctttcctgcttcagttgccgtgcgtgtgtggcgcggactgttatcgaacgcttgcccaggcagataccagctagcgacccagttgaattgatgctgggtctggagctgtgtgatctgaaggcaggtgatagggtcctcttgcgggttttcgcgttccaatggctcgtagccagcttttccagatgtgcacaggaaccatccgaaaatgctatccgctgattcctgagcaggccagacgtcttattcccagttccctttcttcctgctctccttcttcccaccccttttgatcttttcgtccttcctcctccggtcctcccgacgagccaaattagcgaccctgtctttctgctcggggcttgttggagtgacgatacaaccctcggctgagctggcgatgagctcgtgaagcttctcgacagcgaggatcttgttctgagctgctgaacgggtcgtcgaggcggtcaataggattgaaggtggggatgaagtgtactgaggctaaggcagacacacaacacgtcagggctcagccgtcaagaagaggtgagattgtgcatagagcggactgaccgaaccacgcagaggagcaagagcaaagtccgggagccatttgttacccgctgcatcaggcctgggaggcacgtacattctcaacatggcctttgtgctgagcttgttaacattctgtaaggaaaatatcacgctgagcaatcgagagatccgctcgagccggtccaagcttacctgtcctccgggtcctgatgatcgggtcatttggatatcataagcagtcttgggtatcctgatcgacccgtcttttctgaattgcccgagccatcgagctgcatccctgtgatcctggtcagtgaccaaccgatcgggtccagtagtcaatcgtcgagctgttgaacttattccagccggagggcggcatagcttaagagcatactctgggattctgagcatggaaggttttcacagtttttcacagagggggtctcgtcaaaagccaaagattcaacagccaacctcgttaagaattgttcgacctgacgaacagatgacgatcgcgaccgatgcagagttcggaaccaaatgtgctaccgcaagtcaaggcaagtccttctcccagtctgatgccatgttgatctgatatatcgtcgtgcctccaaccatactacactgacaccatcgagcctaaggtgcttgctggcatacagaactcggcgaccgaaacctttttgctagacaccccctgcactggctgcaatcctggcaatctcctgcctgagctcttcaagactgatgagcaacgtcctagcgtcctcgagcttgcgctgggcgttcgcttcggcaatgaagacctcgagctgtgcttcttgttcaaggagaggctggagcatcatggccgtatcatccacaatgggtggggcgggggaaatggacgattcgatcgaaaccgccgcggacgaggtggcccgtttatggcgctgcgcctggagtttgggcaatagctacggcggcgaaagcgacttataatcagatttccatgctgcgggagagcctacagagatgatatctactgacctgcagagtactggcttctctggccatgaatagcccggcctgcctggcaatcgcctgctgtaccctctcctgagcgctcgatggcggacaaggataacttcggatccgcttggtgaatgcgtcatactctgcaaagagagcgacgaggtgcttgtgtagcgtcatcagttccggtggaatcgcgcccgagcccgggtcgacctgatcaccttcgtccgcctggcccaattcttgtatcaagtcttggtactctggcagggcatcggcgatctcggcttcgagcgacttgagtgccccatacaggcgtgagaagcgcgagacttgccgcatgtccgccatcttttgcttcttggaaacgaccgcccaacactctctacatgtcctcacgcccttgacctggacctcgtctggccgtctggctgtggccgtcgatgcgcccggtttgccttgctcgcccaccccggcgcccgagcccatctgcatccatccgacgaacccctcgtccacttcgtgacccttgcctgttcgataatcggcgacgagcaagagggaacacgtctcgcggcgagtccctaggggcaagccggtcttggtggtgggtccgtccgggatcgaaggcagggccagggcgaggatagtggctggggtgggtggtagggaacagacgatccgaccgcatagccggcaatggtgtttccgattcgtcagcgagaatatcgacctgatgatggatatggacgatgcgtcagtctcgagactgcggcacgtgcccgtccatcgctcactggcatatccgacaccgtctaacctcgccatcttcttcccagacgaccagaccccgctccaactcgcgtttcttttccagttcgacctgctccaaacctactccagtgacacttcggaaccccctccagacatccctcggggtgacctggtcgagcgtattcgtgagcgcactgaaacgctcgctgatttgcggtgtcaaccggggtcgtgcgccagatttcccggccgatggtggggtggaaggtgttatcgaggtagacgccgcactgttcgatgtccctgctgtacccccaattccggtcatcggattgaaatgaagatcgatcaactgtttacagtcaccccggcgtacaagatggtagcgacgtgagtgaatcgatttttctctgcctattctgggctatgctcgacccttgctcaccttggcccacctcctcgtcaatctcccttcctccctcgacctttcttccccgacctttttcctcgcttcgtcaaactcttgcgtcctcgtcgctctcaccccgggaggctggaacccgggtttatacgaccgcgttctcaagttctgaggaggcgaggcaacggccgacaactgctgttgcgtctgtccctgtactccattgaacatcgggctcagggccggcccgccctgtgaaccgagacctggcgtcccggctcgagaccccggttgaggggtctgagccgtgttcgatcctcttcgttccatacccatgctcgactcccagccggacgtgcgtctcctccctacgccgttattcggattgagaccgccggtcggagccgatcctgtacccgcgctgagcacggccccgccgtccaggacaaacttgtccaacgattgacccgagggggaagcgcgcaacaaggttgctcctctccccggcacagggttccctaaatccgaattgatcgagctcgtacgtgcatgaaagtgcgctcctcgttgtacttgaccttgctgcggggaagggtgctgcgacgtcgatgtcaatgtcgacgtcgataccgatcgttggacctgctcctcccgagtgcgtgccaactcgacgtgacgtaatcgcgtcatgttggccggtcttggcggtccgagccgggtcacggtgggtttgcccattgaaggtggagaggagaccgaggaggagagcgtcggtggacgtggtggagtcgagttcgtgttcgtgttcgaattcggatgccgattcgtaggtcctggtgacgcagaggactcgacgttgttgctgcccgtacgaccgaggtggggcggaccaggggatgagctcggggatggcgcgggcgaggtggtattccggaacaatctcgacgagtttgctggcatcgtcggagtctgcaccggagactgagcaggagaaacagcattaccgccggctggaggtgtttgaggtcgaggtttcatcaaccctaggaaagaagccggtctcctcctaatcggggtcgacgtccccgggctgcctagcagattattgttgttgccgccgccattactcgggtgattgttatcgatcgagtaatcgctcatggcatccccattgtccgaagctggcggtgttccgcccactcctccgagtaccccattgagcaaaggtcgtttcgccagtcccccctggacgactcctccgacgccttgcaacccgccgcgaatcgtctcccctaacccggcttgggttgcctgggagacgacgttcccgccctgaacctctatccagctaagcccatctgccagagtattcaaccacgagttggctcccgggtttgtgctcggggtgatatgactgttggtactgggattgacgttggaaaaggatcgttgtctcgtcggatctggacgacgagggcgaggttcggatgtgcccggtgtcgtcatgctgtctgctggtgtcggtgggatgtgaccggacgctcacaatgtcggatcagacttgccgcctatctcgaggggagagttcagatctctaccacgagatgtgatgcggttcgagaccttgaagagagggtggtcatgaccatggttagcatgtttagtttgacaatcatcgccggtatatggctggttgcctgtctgtatcaccattagatgacctcggactcttcgtcaacgatcgatcgagtgagtgagcgagtggtcaatcgatcatctacctaccctgcacacaccaaccacttaccttcagtacattcagatgggtgctgcgaaatcatcttgacgacaacatgatcgaatcgatataagtcaactcaaacatgagctcatccgcagctcaacagcctagacccttaccgggccctgctgtggtcagagcttcgagcgtccatcaagacgatcccaatcgcggtccaggcgatcccggccctacctcgtcggcgactgcgactactgcgaacaacacgaccccgacgcccttgttacatccacatcggctccctcatcgacgattcataggacctttaccggagagcgtgattaacagtaccgaggtcgaggatgcacggaggtggtaccacaacctccgcgagaccttgtccaggcaggaacacagccaaggaggaccacatcggcacgaaaccccaggtgactggacggatcaagctcgatcgactaatccggtcgtacacaaggtcggacagatcgggaggcacgtaggggaccatgtgaggcatccgttatcacgatcgggaccacatccggggcatgggaacatttctagtgatggacaaagcttgtttgccgagagttacatgacggacgaaacccgtggaacagcagccacagggactggagcggcgaccaaaggtcgatcgtcgggtttgttttcaagctggaaacgtgatcggaaacctcgtcggccgaacgtatggcacggcgagtcgtttgacattgggagctcattccgaccgctgcggaccatgtcgtgtacgaacatcaacatcaataccacttcatctggctcggggtccaatgttcgttgtctcaagagatacggcggactgatagatgtcgacgacgagtacctgaccgtctccgaggaagagggaaatggggatggacaacccgacacgatctacggttctccaaagagcatgtccacagatggtgacgaggcggatgttcgcccaggatttcgatcacgaggcacgggcacgacgactcaatcgttccagaccgcacggacacaccaacctgtttcatcgggatcgttgttaccccctgcgttcacgacgcaatcccggacgacctcgacgacgacgacccggacggacgattttcactcggcctactcgtccatccctccagcctcgtccattcctagctcgcccgaactttccacgtcccattggcccacccgaggaggctcatccagcacggccgatctgaacggatccacaagacgactcatcccccccgcaacgggcgtaacgtacgatacctcgcgtcaatccgaccacagcgggaatcacgtcggcatcccaccaattcaacctgagctcgccgattggcctgaacgagacggagcaggcttgtcggcgaggagatcgtccgcccccctgcccgggagcaagtcgggtagcaaattaaagtcggccctcaagttccgatcgagagcgatcaacgaagatgtacaggggaatcacgaacgcgggttcgtccccgtcgctgagggcggaggaggtccgacgaggtctctagcgaaaaagactaagacggtgcaattccccgtgggccatgaattggacgatgcgggcggcgcggaatccgtctctgggttgagaacccgatggagaggtcttcgaggacgactgagggacggtgacgacggagacagtgaagacgatgatgcgaagagcgatcattccctcgaacccgccgatcccaaggaggtgctcgcgaggacggggtccgaggtcgtcggtacctctgctggagtgatcgaggcacatagggctagaccaggagtagcaggtccatacaccagcgctcaggtggacccgaccgtcaacctctcttcgagtcgcgacccgagaacccatggtaggggaaagaacaagggaaagggcaagccgatgggtaacgacgagctcggtctcgacccgacggtacagacagaagcagccgcgcatccagacgcggtcgtccttcgggaccgaatgcttgtcagagtgggaaggaacagggagcgtggattagccggttacgacgaggccatgtcaaggagaaagccgtgctcaaggttggagcggatggagggtgagtttcaggttcatcgacccggctcgttgttgcttgcactgatcatgtctgtttcccgatgtgttgcagagtatctggtcgtgtatcgaaaagggcggatcgaattgtatcaagaatgggtaggccgtcggcaataagctcggatcattcggtaaggcgatgctgatgggaacgacatcccgtcatatcccccacgcaacagcgactgcctctcaaggagcgattcgttcgaacgaaacggctttgtttctctattcccttacatcccaaatacactaccttttccttgttttcccccgtcgatctctctttcgcgctttgtctcgacatggagcccttcgtggaagagcttcagggtgagcatggcggtcatcgagcggccaatctgcgccgacgcctcaaggactcgaagcaattgaaatggctcaagggtgaacgcagcggtagtcaggtattcatcttcaactgccgcgagcgggtccgggcgatggactggatgtgggagatttggaaggacctcgatggcgtcttgcccgagacgctcgaggtgtatgtgcctgacctgcagaccacgatcaagctcccaagacccgtagaggactcggtaggaagcatggcgacgtgtcgtacgctgtctcgaagcaaggtgctcaagaccgcggtcgacgccctcaagcagttcccaacgtttgacatgctcatcgaaagcgtgcgtcgagagacaggcgagatgccgaggttggagctagcttggaaaagggaggaatacctagaatggatcagtaagcacgatgagaagaggtcggaagggtgcaagcgagaatgggccttgttagcgggtctgtccatcatcagcgtgagtacagactcggtcttgtgcgcttttcagctcgtgttgatccgtccatttcatatcagccggcccataacgcacgtctcgagcttcgtccggctaggcattcaacgtcaatgctgaaattgagcgacggcagcaacctggaagaaccgccatgcatagagggatacttgtatcgccttggcaggaaacaaggcaaagctagcagggagcaggtgtatgtctactccttcgacggtcagtgcttcgcgtcaacatgcccccggtggaccatggctaactctcgccgtgagaaattaggcaacctgttctcatccctcccgcggaacgcacatacacctctccctccggaacacatcgatgttaaagggtcggcaactgacttcaagctccttgatacctttatgagcaatgactttgctcgaggatctcgcaacatattggaatgtaccggtttcgtcgatttccgcgatatcgttgccgtgcgcagcaagaccttgaagccaaaaaagaccgtgatgggctcgatagccgggaccaccgatgtggaagacgctccggaagacgctcaggcagacaagggaagcaagatattcgagatgagactagaccggtccgaagagaaagtccgcttcgaggtgagcgggcggagttgtttatcacgttgtggcttcgagtctgatcgacttgctgtcacacaccattccaggcgcacaacccagaggctgcaaaagaatggatagacaggcttcgtcaactgcacgattactggtcacaccgtcaacgcgtagagttagtcggctcctgctgctcagctttgtcaccgatcgctgatttccggatgtccatgacagtgcccgttcccgaatggatacagtgcgatccgctttgcgaggttccgacaaattcatcgatgacgcaatggaaattgaagacaatcctgaattaaatctgcaatggaactggtgtcccatcgaagggtgtagcccagtgattcacgctggacgactctttgtcaagcattcgcaaggtagccaattcaggtaggcagaaacagccaggtcagtgtaaggaagtgtcgatgctgacagggtaaagaccttcagggcacattatactgttcttactcagggctacctcgtgacattcagctttgagcgcagcgctttccacatcaggcgtaacaggtactctttgttggaggcctatgtaagttgcatcatgtaagattagccaggggtaacgttactgaattgcaacctcctacagatatatagcggcgtactcgcagaagccgagctgacaagcgtgttgcgtgaagacgcgttcacgggcgaggctcgcatctaccaagacggattggagaccgctgacgtggccgaagattgcacatttgccatttggatgcgtaagcacgatacccacaggatatcgaccaaacgtgcaggccgtcattaccaagaacgccttcacgacgacgagagctacacaccaccctttcttggaaaacccgcatcgaaactcataatactgcgagcgagatcaaaggtgcgtcaatcttgacagacaaatcctccccgtaggttgctgatcacgctccccatctttacttcgacagctggaaagggataagtggataaggatcctccagatagagctgcaacgccaagcggatgcacacccggagaggaccagcaaggcgcgaggcagcgggctggtcccggaatgacagggcatttcatgatggcgagcgtggtctatgctacagtgcagacatttcgtgacgtgatcgttcatcttcctaatcgctatcgtcttcaatcacatgcaccttcttatgcacaggtccatcttcgtcagtatccctctcgtcttgttccaactcgctatgccgtcttttgcgaccgtcgctgtccgaaacggagccgctctttgattggccgtcgtcatcttgcatggcgtccccgatatcgtcctcagattcgctagccgctcggctgacatctccattatcatcaccatgtgtgctggctgtcgtgcctcgagttgcgtagccgtgtccgctcgtgagagcgctcgtgcgactgttccgagtgttgcgaccgtggacaaatacctcagcctcgactgatgacgatcggtaatcttcggcgtccgacgtgtctccattcttgcctcgtctcgagctatactcgatcttcctatcatcctcgtcgtcaacctcgttttgctaagcgaacaggtcagctcctgcagcgtcatactgctaacgagttgagctcacttcggcatagttgactttggttcgacttcgggtggccctagcatagtcggcgatgacgggtatcgctgcaattcttcgtgcttctcttgctgcacgctccgcggctctggccttcttctgtaccaattccccgcgttgtctctcaaattcctgtggagggatggggcagatctcaggcatcgtccaattcggcatgcggaatgtacagtctcacctcgaagttggcgtcgatcccctcgattctgctctgcagaaatttgccgaactcgacgtctcgctcggcgagaatgatactattcttcagttgcgttgcttttgcttttgatgacgcgagagcctgctcctttctcaggtttggaagctgttgttctttggcgaggtgtcgattcattaggtcaaggtattcctcctttgtcgcagcggaagtgactgccatgatgagagagacctttaagcatgggcggcgaagttacatcggacatgagacaggcccacttactggtcgcgccgtggatttgcatcggctttttgatactataaactctccaggtatctgttggacaatgtcttgttagcccagcgcccgcggtagcgtcgcaagtaccggctcaccttcgatgacctgccagtgctgttgctcagaacccttgtccgccctgttcacatcgtagggggtcgccactttgccttttgctctggattgagtgacgatgtcgtgcacgtctgtgtccgtgactgcgacggcccacgtatgatcagctcgataccgtgcgctgatgagtcggtgtggccagacgtacgattccaatcgacgagttgcctcataatcttgaccttgaccgaccacggtgaagtccaaaagccttgatcgcgaagaggattgttctcagttctgtctgtcattggatcgttctccttcatctcgcgatatacgagcgtgttgacgtctttggcagccatttcatcggcttcctgcgcggaggcctagtcgagtgaaaatttcggtcattccgcttttgagcgtttcgagacatccaattcagctcacctcgttgacgtagtgttcagttttggtgaaaatatatgcgtcaaagacgctcaacggtgagcctggttgtaaacgttcgtcgatcaaatgcgacagcttgtcgatgatattgctagagactgggatcagacgccttcgaccggaatcctcttgatgccatcaactcactctccgttgatgacccctcgcaggtccagcagtgctttcgatggcgcatgtcgagccctggcgccttttcgcttcaacacgtcccgtttttccctgtcctccagcgagtccgccaccgctttccacagcggcttcaccaagaccaccagggcttcagtcaacccttcgtcaggaacctcggtcttgagtgaagtctcgaatctgataggcgagaaagaaaatgagaataagccattcgatgcgtaaagcgggctcttggcctagaagcgcgtcgcgtcaacgcctagcgcgccctgtcgcgtaatatattgagttgcgatctcccagcataccgaaatgaatcgttcgatggggatcctgcagagctcgatcgtctcgcaacgtagtcacggaaggacgacactcactcatcgacagtcttgagctccgtgatcacgttggttttctggaacctttcggcatcgacagggatgttgtctcggcggaatttgatgaggaaagcccatacataggccacttgccaactatgaacaccgtatgaaccaatctgactgagctctcggcccatctcgcattatcaggcttgtccttcctagcatcggctcactcatcctgaatcggtccttccacctcgtaatcacagtcgacttgagccttcctgccccagaacaccctgcttcgagctacgaccgtgctagccctcttcgaactgcttccattgctcttctgggcctcttttccgttggcctgctttgacgatgacgctttgccgtttgctgtagacttcttgactttcgttttcgcttcgtacgcttgattactgccggagacaaggatcttttccgatctcttcgaagatttcacttcggggaggggagcgtccgagagctcggatgaagccgaccggtctattctcgcagagctctgttgctcggtcatactgatcagctactaagtgtcataggtaagtgctgaattcagatcgctaggttgttgtgctgatgttgagtcctaatggtggtacatcgtacaatcatcctgacgttgtttcgatcctttcagacctggctccctgatgatgagcgaatcgacgcgcttgcaagcagctcggtccaagccggaaggcgcttcgagctctagccatccggcggcctaacaatcttgacagcgatcgcagcaatgacctggctatctatcaaatcacagtacagacggtgcctttactagatcattccacaagactagtcgaaagtctgatggagtcagggccagtacgtggagcgtgattccgctcgtatctaatgcattgtcattttatgtttctcctctgtgcttgtgtacgttacaacgtgtgtgccagacgtgcctagttgggtcccaacatgactgcgagacgcgcaaaacgatattagtgtcccagtccaccgttatgatggagcacacaactagacactcacgttcgggcctgacgagctggtcgaattcctctgaagacaagagtccgagggagagggtagcctccttcaagctgttgcgtatgaatgatggcgtgacaagccttcagcgcactgtgtaaacatatcggaccccaggttcagtatcactcacgtagttccctccttgtgcgccttcttggcgcacttggcagcgtctggagcaagggtaacaacaagtcatcaaccagggttcgcgggtcactctcatcgcgcgatcgatccagaacgtactgtcgtatcccattcggctgttgaggcaggtgaccaacatgagactctcgttcaagatctggttgatcctgtccttgttggcctcgattccgacgacgcagttcttggtgaaactcctcgatccgtctcccaacagtcggatgctctgcagcaagtttttgatcaagacgggcttgaagacgttgagttcgaactgtccataagatccggcgaccgagatggtggtgttgtttccgataacctgagcggcgaccatggtcaaggcctcacattgggtagggttgacctttccgggcatgatggaagaaccgggctcgttctcggggagcgagagttcacccagaccacatcggggacccgaagccaagtaacggatgtcgttggcaatcttcatcaaggagacggcgacggtgttcatggctccggaggcctcaacgatggcgtcgtgagcggccaaggcctcgaactgtagtttgcggcgatccgtggcaagacaagcaggagagaatcccgaaggagaatggcactgatgttagtcgatctgaacaggaacaccatcgtgacttcgacagacccaccttgttaggggcagtcacgaacttgagtccggtaatgtcagaaatggcatcggcgaccttgacatcgaaacccttcctggtgttcaaaccctacgggacatcacgccgaccacttcagcctatcgagacccgattgcaattcctcagtaaatcaaggtcgaaactcacggttccgacagcggtaccaccctgtgccaacatgctcagcctggggatgacatcctcgactcgcttgataccgttggcgacttgctggacgtatccactgaactcttgtccgagggtcaaaggggtagcgtcctgcaagtgagttcgaccgatcttgatgatcgattcaaactcggctcgcttggcctcgagggcatcgtgcagctggtgaagagcggggaggagggtgtggttgatctcgacgacggcagagacgtgcatggcggtagggaagctgcagagtgggcgagaaggcggatatccctcgcatcagctacgagccatggtcgtcgccatccgtaacctcgtgcagcggaacttacgtatcgttggagctctggctcatgttgacatggtcgttagggtgaacaggagtcttgcttccaagctctcctcccataatctcgatggctcggttggagatgacctcgttgacgttcatgttcgtctgggttccagatccggtctggaagacgacgagggggaagtggtcgatgagtttaccagagatgacctcgtccgaggcttggcagatggcatcggcgaccttttggtccatgcctgtcgacaagacggggtcaagcgcgacgaatattgtcaatcagcactggcattggtgatgttgcggtatacgcctgaactgaccgtaggtagcgttgacctgggcggcggccttcttcagaactccgaaagccttgatgagaggagcgggcattcgctcctgttcaccacctggagactcgacgacgtgttcgttatgatcagcgttcggtcgtagaatgactgacaaaagatgttgcggactcaccgatgtcaaagttcatcaaactcctctgagtctgagctccccagtatcggtcggccgggacatcgagaggtccaaaggtgtcggcttcttttcggtagttggtctggtgcagcacgacgagtgcgtgagctacagacggaaaatgacgagcccgacctcgaatcaagcgcatggacataccatagtgacagacgacgaggcgaaagtcctagcagagatggtggcctgagcagcgagacgacgagcaggaagctgttgaaacgatcgcgcaacagttgggtttgccgagcgaggcagatcaaattggattttatgacagagtgagaagcgaatatcgatatgtcagtctcggctcatcgatctccgagaggtgtagatatgacagaggtcgggtaaaggttgagccacttacccttcgggcggaggaagcgatgacctgtctagcaaacattagaaggaggagagacggacgacgttcaagaggattgaagacgaagaggagtggctcgttttccaaagtgagtgacgacgacgaccacgacgagctgatctttgcctgaagacaaatggcagattgggccgatcaaagccagaaagtgcgaaagtgagagagagattggcccaaagtcccgtgagtgagcgatggctagctggttagggggggggcggtgaagtgaccgagtgagtttcgctcgagcacgagtcgtcacgcggtttcttccgattagcgccgccctccgccgcggccgatcgatggatgtcgagcttcgactgtagtgtagaagtgcttcaatcacttgacatggtacattgcatttcaaaatcgcctcgaagaaagacaggcagtttcattgttacacacgaaagatcacgtcgaataacccgaatccgctcgtcttagatggcagcccctgtatgatgaatcttgtaatcagggcgcggatcacaaccgagaaatctcgcgcaactcacactccatcctctccttgccctgcttcttggatccccctccgatactgcccaaaaaatcggtaggatccgcaaacggatcgttggggtcaccaccggccggagcgccgaagctctcgtcctcatcatcggagagaggatcataagtcggtttcttggtacgcgccgccatggatcctcgtcgagattgcgatcggctggcagcacgggcttgatactccgagtctgacgaatcatagtccgagtagtcggataaggttctatacgcgacatcgctcctcagctgtagttccgtccatcgcgaatggctcgcatgacaaagacactcaccttcgatggtcgtcgcccaggtcgtcaggagtcatgggaggaggcaaacgggaagagtttgtcctctcctgcctcctctgagacctcctgtcgctctcatacttttgcttctgctgcatcttccaaacctcgccggtcctctgttcttccaacttttgggcttcgagctttttggcgagggcgtcggcgtctttggcactatcggcacgagccttggcggtcgcctcgtcctctgagtcagagtcgagatcgacggatttgctcatctgcacgcccgagtcgatgctgagtcaggtaaagccaatatatccgttctcgtagctagatacccaccttgtcgtaaagctggatcgcttcaacaatcttctcgttggcatccaacaagactccgaccatgacctcatcagtgacgacctgtaaggtagcggatctcgatcaacgtcaaaccctagcagtatcatgattgaaggcccgctccgtacctgaatataacggatgatgggtcgtcgaacgactttgcattcctcgagagcgtcctgaaccttgaggttctccaacatggactcttcctgacggttgacgtgctgaggcagtgaaaagggggtcagtaattttgcacctcatctatctgtcattcagtccgcccttactcgacaagcgttgacgagggaaatagcagccgaggaagcgttggcgatagcgagctggatctgaggcttctccctggcgtagtcgaagggaggtcgcttgggctggttcttcatcctctccttttgcaatctctccctctccttctccgctcgtcgtttcatgtcctgctcggccaattgctgtctgtacgcctcggccttggctttttcctcctgcttgaccttgatcgcgcgttcacgtcgctcgacctcggcttccctagcttcaagagcagcacgggcatctcgctcggcccggcgtcggtcggcctcgtcctttttgagagccagatcagcgtaatcggcggcagaagtggcgtggcctttcgtagggacccaagagtgctcgagatcgttaaaatcggcggtgggtttgcgggcgggagcagaggacatcgaggtacgagggctggcgggtgctgacggggcagccggggcttggcggacgacctatatattaggggctcgatagattagccagaatcaccttctcgtgacctagcgagttcatcgacgcacctttttcccggagtactgatcatagagaccggcaagctgcttgttcctggcatcttcctgtattacgatgggcagattgagcgctgacttcgataccagccacgattacgacgcttacggcgaacgccaacttccaagcgtggaaaacggatagaagctttctcttaaccttgggatcaaccagagacttaagggaatgcaacgcagattagtctggaatatatgctgaacatgcgcgacttgtctgactcacgtcggtggccatgtctttcaatcgctggagcaactgctcattcgcgaaagtagccttgtagcccttacctccgttctcggagagagcacgcaagagctggtggcggaaagagtcagatcgggactacgaggacttgtacatactcagttgcaactcacggtcagggcacgcaactgcctgtgaacattgccatacttgagcttcttcctgatagcacgcgagctctcggtgactccgtccattccttggattctgatactctcgagcagctcgttgactccatcgtaagagtcctcttcgtagcggtccgaggtgaggatctcgacccaatccgagatggacgagtgcggcttttcgccctcggccatggccaagagcgctttcgcggtgcccatgtatgcgccgtatttcgacatgttggatggattaatatggactgttgaactgttgagcaagatccgaagacagtaaagctggttctcgatgcagatgtcacgatttgaaggtactgatatggattgcctggtcgtacgaacctatcgccctatccctagggacgacagatgcagttgaccgggtccggcaagtgtcgtcatcgaccgttggatcgcgaattaacaaattgctacccgcggtgcgcaaacgaacccggcttgacgcgggtgactggcctggaatatgcctcaaccaactgcaatgcgactcggtttagactgcgtccgaaaccagaatacgtccaaatcgatcatagccggatctcctaaattctgtctgcttcaactttccttccgctgtaatcacattttactctccttgagccatcaaatggagcatcatcacctgcaagaccaagggtgacggtccgagaagagacagcaaaagatcgtggaaatgagctccatacgcttggctcgatcatgcgacctctcataacttcgagcttgatggagtcgtgctccttctgtcgatgtcctgaagctcggttggcagcgacaaaaccacaattggccgcacagactgcgccaatgcagcctagaggttgcgctcaaatgccagggatcctctcaaattggtctcgttgatcattttgatcaaggcaggcatagtgtcgctgctatcgtaatctgaccctctcttgcgctgttctatcaggataatatagtcgttgacggtcccaaagctgaacaagcgtggtatacgaagttgtcccacccttagagacgttgcaagaccgtgcaagtggtgccattgagagcgctctccagctagttcagattcgcttcgagaatttgcgcatctgaattagaccaccgcatcatgtcaaagtctcgcttaaagctgacatggaacatataacatgttccggcggaaatgcgcttgcgacggcgctggtcttgctgagtatcgattgctttcgcgaatccgctgatcgatgagacgttttcgacatataactatctgcctgcggtctgtctcaacgtcgtcaacttagcccaatgtggagctagtaccgatcgaatcagatctgggcaaggcagtcgaatgacgcattataggatctctgctagcccggatcgatttcgttcgttcgaagggtgacgaggcttcctcgccttctaaacgtatataaaagcgcactcgcatccattcagttcgtctcataaagatatcccgctcgtaactcgtaaccagcccgtctgtcacgctttcatcacttggtgagcctttcttctttctgaacatgtgtaagtcccggttaaactaagatgaccgacacgacttgtcctgattggaagtgcatgcgatccagtctgcattcgctgcttcttcaaacggtccaaatgtcaacttcacctccctggcacctatacgactatccccgtctacgctcccacggaccccgctcctatcgtccgaggtcgaaagaatcaaccgacatgcacctcttaccggttgggacatggaaaagtccgacgcgccccttatggaaatcgcaagcgcagtcaaaaacctttcatgagtaaacaagaggaccgacacgacgacgagaccgaggacgaactcatccctccttatacctatacgacgttttccgagtcggatcgcggtagggacggctttttcaatagtgggatcttgccggaaggacggttggggttctacctcaaaagatcgaatggtgggaaggacatcaagaccaagaagactggctgagtcttccgaggtcccagctcctgtcgatcatcactgttgaccagaacgtccaaggcaggagtatccaaaccggggtacgagggatgtagtagggattataatgatatgagagtcggtacaattagatagaagaatggttccagtccaaggagaagaacaccacaagaacgtaatacggtcgaacggttcgtgtttggtttgagtgtgaagacgagaaagcccgaaatgaggaagaactaaaagaggtaccacggtatagagagatcgagccggcaagccgaccctggccagtctatctctctgctcagacgagaagagccccgacagctccgagtccgacaacggctccgaccttggtccagccgaagttcaacgcctctgccccgttcgccggggtcgacgtggtcggggccgagctctgagatccagctccggtcgaagtggcggtacccatgctctggctgactgtggcagggctactggctccggcaggtgtggcggtcgggtaggtggaaccagcgggcttgagttcgaacgactcggattcggcgtagatgttggtagagttcaaagtatcggtgagctgtcgagcgggagagggagaatgatcgtttcgatcagtaaacgtgggtgaccgtgctcgaggatcacgactgacttggatggtgtatccggtcccggcggggagagcgccgggattcaacaagtacgagcccctgaaaccgtcgactagagacgagggaagggtacaatgaccgatcagctctctgtgagtggtatgtgatatgccaaccaagggcatcagagactcgggccgacttacggatggcaacaatggcagtcctgtcagtcaaaaggttgacgttcgggttggcaatgctgcatcatcaacacgatagcaaagccaagtctatcagtagcgctccaacgtgggtgtggccactgccgatctgactcacaagacggagaactgaggggcgggagaggttcctgtccacgagatgacattgtcgctgtcagagacctgttccctcgattgagcggggtccgaaggtagcaaaggtgagttctgatcagtcgagcgatcaggtgtggaatgccacgatatgacgctcacccagaagatctcgctgctaggagaggtgatggtgaactgagcggcagccgagccgaggagagcgaaagtgagggcggagaggatgccgaacatgttaaggtgggatcgagttgagcgtgatgtgatgtgatgatgtgggagggtgaagtgaaatgacaaaggagctgatgcgtatcgcaatgtgaacgattgaggaggggcttgctcaagggagatagctctagtgatgagcgacgaatcaaaagcttgtggcgaagatgaacgggatcgagatcaagaatgcgcttgaagtagacaatggtgatggtttgaatcgatggtgtgatgatctgaacgagcgagtgggtgggatcacacgccggagacaagtcgaaaggtggcgggtcgcttggcacgagtctgcatagccacgggaacgcgtctcgataaagtcgttaaccgggacatgacaagcgaaggccctttggctgaatggtatctacacctcgagttgccgctcgaataccttcagtctctgggaactcgacgctgagggttggttcgaatcccgagccgggcaaatgaatattccctcggcgggggatttcagagcgcctggcagggagaccccgaaacgaataggttgctggcataggctatcctcggtggctcgagggtggtatcacgggatcgctacccgggagatggtgtagtctttttggggtacgacagactttgcaccttgccctatcgcagccgctggctgccgacatgcccgtctctctgcagctctctgagatacatcctcaccaaaccacaatccaataaagtgattgccaaggtcatggttgatatgaactcggttgcaataaacaataatgacctttgttcggccagctgacttcggaagcttccggaagtaatctgatagaacctcggtcgttgtcaattgtcaacaacagataacccaccaggtcacctatgtgagcggacatgtcaagtatcatcatgtccgcttcattcggtcgagccctcgaccaaggtcacctcaccctcgacggtcgtacgggacatctagatgtgcatgttccgaccctgcctgtcgatccttccaccttggccactgtgtcaatacacctcgatagccgaccacactgtaggaccagtagctatgcccaaaatcaggaccaaccgaacaaagcctcctccagaggggtacgaggatatcgcgtgagtcttgtacccacactagaccggaccgactcgaaatcgcagtcactgatagatgatcgctgtatccgctctagtgatatcctcgaggactatgctaagaagatgcgagacgctgagaacgatacgcacgagggtaaacgtaaggtcgagtcggtctggtcagtcacccctcgtcatcataccaattgtccatcggagcagcctgctcacgcttgactattgccaatgttggactctcctgccatgcatattattgggaacgacgcatctcgcaggcctatcatgcgaatagctcatgcccgatcgaggtacatctacgatctctactacaagcgggaagcgatcagcagggagctgtacgactggctgttgaaggaaaagtatgcggatgccaagtgagtcaagcctcgatctagctaatcgccagatgggcagagttatgcgctgaagagtacatcgtcttctttcatagcctggtagcaaagtggaaaaagttcgtcacctcagcacccgctcgcgctcagagtcgatctaacgttcccactatccgtactgacgcgactcctaaccctcttcaatctgtcaggaatggctacgaaaagctctgttgcgtccggtgtatccagaccaaggatatgaactaccaggggtctacctgtatatgtcgggtacccaaggcgcaactgaaaaaggggaccgtcgtcgagtgtgtgcattgtggtgagtgtgccctgaatcctaccaagatgaggatgaatcactgagcgaaaactgtgggtgatgatgtaggctgcagaggctgttcgacggattcctagtcaaagccaaattgaatcccgtttgtcagcctttttttcgcgttcggcctcacacctacattgtaactgtaatccaacccgaagattcaatatccgggatccgtccagatcaccatctccatcgagttggttcgcaccgcaggacttcgttgttgagccgatcgtaaccggttggattaggatctcagcgataacgatgcgacattctagacgatacagtcatgcagatacaacaacagtatgatggctcatacaacatacccaagagcaggagacatatcgaaaacgaaaagcgatacagcgtgcgatcctcggccggatcaatagtacccgttcgtaggtgcaaacgcgaccgactttctctctggccgtctgtttgatgtgtagtacgacgtgctcgtcgccggttgactgaaatcaggcatgtacgttggtcgaggctggccgctcatctgagggtaaaatgcgacatcttgggagtaaccttgtggctggatgtaagcaggtggaggcgcctcgtactgccggtatccataaccctgggcgtaaacggcgtctgatttctgcgaagaccgtttcttggatttgaaaagaccgaaacctgtgtggaagcgccaatttagcatggttcactcgggatcctccttttcttgtcacgatgagggcttacccatggtgctccgtgttcttgttgtagaggatgtcggattcaaggaaagcgcgttgatctctcgaaaaggatgtgctcggtgtggtggggtacgagggtgagattcagtcggttcacggctcattcgcctccatcgcatcaagcttctcatccaagtccggtcatatatagtcccacggggcaagcttttttccttaccctatggcacgaagagctgcggccgtgactttacatcgcatgcgtcacgtcaaacaaaggaagtgaacggaaaacaaggtcgtgcgatagcctgccctccgcgaggcagatcgctgattgcacgccattgatgcgtgcggcaacggcttatcaaccgatagacgatcacgacgatcacaagatcagatcattcgtcgtgtggctcctttgtgcatcgtgctggcaacgaggtaatttccaaggcgttgcaagcccgttggagttgatcaggttcaaagattctgattggcgatctgcacgtctcacgcttcgaatccaacctttgtgtagcattgcttgcaacaaggccttttcgtggttcatcagattctcatcgatgatcatgctttattgcgcaacaagattgtcccctttgtgtcgcgttgacatccctttttgcctttcacgctgccctaattccctacctggatcccctcatgcgtttggccccggtcccccttgaccaggaggtccagtcggatgatttgagatgacggactggggtgtagctggatagggatgcggtgatgcggctgaaacgtgacaagtgtgttagaaccggtcatgccatctgtagactagtcgcgtcatttccggcgccaactcacgatgagacattcctggaggttggacgtaatagaccggattgccggctggccgcaacatggcgttggcgaccatcataggagactgattaccgggattgttggcaaacgctgcaacggaacaggaagcgtcgatgagatttcgattgcgaaggatcagcgtcgcacaaacagactcacgcggtagcccttgcgggaaaccgtttggcgtgccaggtcctgcaaacgaacatctcggatttagacgacgaggacgctccgagaccgattattgctcctcacctcccatgacaggtccaccttgtggaacgtaaaatccgcctcctggcccatatggcggtgcgaaattcccattcaccatgcctggctgaccggggctaccaggcacggggaatccaccctacacacatcaagacgatcagcttccaggaaaggcttgcgagccacgcggtcccgtaaccgacctgatgctgaacgcgatatggcgggaagggaccgttgggccccatggcaaattgattcatcatgggtgcacccggatgtccctgcatgtgcatcggatcttcttccattcccaaggggggtgcagtcatgtaggcgcccgtaggatgcagagcggccaaaaactttttgcccgcaaatggccagttgacagctaggatcgcgcaatgcatcagcgcaaaggtccccgtgagatgcgacgttgcgagactgacggatgtttctggcctccacgaccttgcccttgaacgggttgaaatcgtcacggatattgaccccgccattgcgtttgggcacctgcgcgccaaagaaggggtttcgagcgggggccatcgcggctggggccgtcaccaccgggacgacgggtgggatctcgacggcgggctacggaaaggcgcaaggcttagtatgctgggtagggcgtcttcgatgcatcgggacccacaggtgcgggtggactcttggggtcaacaggtgcgccagtctgaaagggtgaccgaatcgttgttagcgacggcaatgtcctgcgtaaagcgatcagcgtctacttaccggcttgaagtcggcagccttgggattcggtttgaagacaaaggtcgaagcaccggggttgagcttggcactggcagctgcgggcgagacggctgccgactcctcggcgctcttgcctgcaaccgacgcgttgccatcgtccaccttgacctggggtaccgcggcatcggcggtcgaatcgatagtgatcgcttctggtttggtcaaaggggctcgatggaagggcgggatctcggggatgaccatcttgatcttgggcttggccacggcagcggcgactggcagagcggcagcgggtttgggcgtaggctggacagagggagcgcctccgaccggtttggctgaagagacgttgggcgacgtcttttgcgaaccccctacgggcaggtccgagggtttggcacccgggatctgtgattccggacgtgagggcgtgatcagtatccctcgacttctcccgctcctaccccacctcatgcgacacggaaagcccaccttgaaggttgcgccaaactttttcaaatcggccaactttctctcgcgttccgctttggccatggtctcgcgttgtttctgcaacttttccttttcgtgctcgacgaacccttggatgtcgcccttgatcgcctgggatcctcgaggggtaccaccctaccgagcgagatgtccaggaacgagtcgggtcagggcgactgcgagatgggggcactatccgggggtccatactcaccgtcctgagcttttcgggcgtcctgccttccttcttctgaacctcgctgtcggtcccggtgacgttcaacacgggaagaggactcgccgctcctggcttggactcggccccggggaccttgccgctctgagccttgacttcgggcttgtccgcagcggcagggacggccggttgcgtatccttgccgtccttcttgtcgggctgggcggcgggggcgtcggacgaggcccccgatgtcaacctacggagggcgggcgggacataggcgttcggttgaccggatttccttcggacgcccgagtacctaggagatcgcgtcccgtgaggatcatcagctttagcgctgaaacacgctgaacatggggcgccctcacttgtcttcctcgtccaactcttctccggcgtcaccgttgaccacgacgacctggcccctctcttcggcgacgtgcgggttttccgtctttccgcccataatctccctttcgagcctctcggccgtcatgatcttttcctcccattccttgccgtgaccctttttgatggcggtcgtgtagagcccctcgtcgtaatccgtcttggtgccgaacaacttggcgttggtagcaaactggtcccattgtccgatggatccattgttgtactcggacgcgaggtcgccaaacgtctcggcgtctcgttgggatttggaaggggcgggcgaggtcgatccgggtccggctccggctcctcctgcggcggcctggttgatggacatggcgttgatcagacctgcgagagggctaggcgccgagggggacggactgggtcctgatgatttcctcccttggttcggcgtcgggggttgcgtaccgagcgcggggaacgccgagccaccgggttggggttgttgcggttgctggtgggatggctgatgctgaggaccaccgggaccaccgggacctgttccccaaggttgaagttccctcatcctcccgctcccacctccgtgattattatgaccgccgtgagcccgcgctccacctccgatatccgcatccgtcctcatccccgaatgaccgttgggcgctgtatcgatcgagggggcacatgtcgttttcgtcccccggcgcgattcagtatgtggaacccctcgagacggatcacgacagggaggacggagggccgacttacccgaaccaagcctgaccatcccgctcgtcccacccccacccccaccgccgggtcctctcggtccatgtccatgtccgtgcgggacgtggccgtgtcctccgttaggggggggacctcgccatgaacctcgtctgcccatccccgtccgcgagtggagggtatcgtcgaatgtcgagtacggtatagttgggggacgaaagcgcacagtaaccaagaatcgagaacgagaacgagaaccgagcacgagcacgagcacgagcaaaccgagatcgacctgatcagccctctcgctctaggggcagggatggggatgaggaaaaggaagctcacctctgtccaccaatccctgaaccctgaccctgaccttgactctggcctgccgtactaccaccggtgctgccagtgctgctacccccggtagggttagttagaccccccgaggtgttgggggtctgtttaggtttctggttgatgctcatcctcggtttttaccctacttgatgcggtgatggcggatggtgacgagatcgaggtcgagatcgttcacaacgggcggcgaccagggatgataggcaatgggaatggaaacgagatcgggagttagcctcggggattgatgaggatgatgatccgtaccacccgtcgtcgagatgatcaccagtggtgtcgggattaggaaacaaggaaagaaatcgacgacctacttaccttgacctgtgcagagggcgtgaacgtcgaattgtgatggggaacaatggatcaaagagctcgcgctggatccacccgtgaggagcgggagagtcgtcacgctaggacgtcgagccgtgtatgtgccaaacgaaggacgagggcggggggcaaggttcccgacgacgtgtgtcctgcgtatgggtcggagggaaccaggtgatgatgagctcgttggatggacacgactgctatagacttgtacatacccctacactggtaccctgacctaccttgctacctctccggtgcctgagagtgagcgacgctcgttgcattgaccggggttgggtggttggcagggtggcctgggggggtgacgcgtgggaaatgatgagaagatgacgagatgatgacgtaaagtaacggcatttgactcgcgtgtggtgatcggaagtaaacggcccggcgtgatgctctcggatgtaaatatcgcgagttgagtcgaccacgcgccattcgcgtgcgagatggataggagaatagagaaccaggtcaggtcgaccaggtcacatatcatccatcgacaccgacacacaccacctcgaaaggagagacctcgaccatcgaaccggggttgagagctcttcggggcaccatgtcgacgtctcgttcaaacccccgtccactacgtatcaacccttacaacaccaacatcgccgaccgggaccgggaccgggaccgcacctcaccggatgtcctcctctacccgaatcaccagactcgacgagcatcatcatggcgcgctccaggtcgcggtcgagatcgagatcgagatcgaggtcgaggtggtaacgataacaacttggaaaggctcggtctcggtctggcgaggttggggttcatctaccgttggttcggacgagtagcggggagaggtcgagctgggatgagagacccagacgacataggctttgtatccgggtccatgtccgggcctgggtctcatcgtctgacagaccgataccacccccaaaaccagtcgaccggtaacccccacccccactcccagctcaacctcgaagactcccctcctacgcgtaccaaacggttcgattccaacccttcccacccgcctacaacccggactacccacctcttcctcttcacgctctccatcttccgtaccccacgtcgagcgatgtacaccgtcctagggatcatactcttcctcctcattctgagcacgttggtagactcgcatgacgctgccagtgtcggtatcggtgcaggggcgatgagcagggctcggggtgggtcagcaggagggaataatagcccctaacccctaacccccaagcttctgttgctgtgttggtgttatagtcattggtgtagcaaacgtgcaaggtacaaggagtctgacgtttgatgatgagacggagcgcctgccattcggtcatgaaccggcgccgaagcaggctaattgaacactgcactctctaacttcactcagcgtcgatctcagcaacttggcgcttaactcggacagactcacgattgttcactatcgtactagctgtagcagctcccgcaccgaaaccaagtcctccgacagcgctgtgcgcgaactgtgatagattcagatagacgtgagtcgtcgtgaaccccaacggaatgaggaaatgggaattgtccgttactggtcgatcatgtacgcactgtgtttcctttcccgccgggcgtcattttgaatcgactcttcttctctgcctcgctggccacaacttgctgccctagtgctgccgcgccgtaagaatgggctggagaatggaccggaggttgaccaggcggtagatacgggaccgaagcagtcgaagcgtgatacgggtgcaacgaagtttcggtccgcgggagattgtcatggctggacatcgaagactggaagctcgactgagagcgggtatctggtcgggagagggtaaaatgggacctatcgtaccacgaggtagcagcaattcgtcagtcaacgcggtcatgctcgtgggttcttgcacgatctgctatacgcacggcggtagacgctttatataattatgggggaatagcccgtgcctggtcggatccgcttccaggtgaccgcgataccactctgtattcactacgtttgggcagaaccgcctgtgagcagtgtctcgagacttcgaatgatcgtgagcgttctcagctcaccctcctcgtcgactataacgacgtcgtctttccggaaggacaagtccccgtttgccttactcgagtagtcccacagagctactgctcggtcggcagatccttcttgtaggttgaaaggttggctatgtcgaggtggcaattcgggcatacctatgagcgggggctgtgtggacggcccagctatggattggtggttcgagcgattcgaggcctcttgcgttcctatcgatagcatgccaaagtccgtcgcgagccctccatgctgacgacagatgagttggttcctgatctggtccaattcaggagacgccttgaggatgttttgcgattgcagaaacgtcaatgaagatatcgtttgagagacgacgtgcgagagaagagcgtcgtggggattcatcctatgactgtgggaggccgatgtgttgatcccgaagctctggctgggagactgcattcgacaggatataataacgtgaccgaccgatagagggacacccttctgtcaaagtcgacttgatatcgaggaccgaatgccaactgttatggttgattcgattcgtagcagcctaatacgcgagaaggtgctgcgggtgacgctgtgctgctgcggcgaacgctcgagccaatgagacttcgcgatcgagcgacacgagagaccatcgcaccgcggattcactgcggccaggttcgaaactggttcgtgatgacgaccacgcgtcacttggcaccaactgtgtcagaagcgcttcctttgatccgcgggtatcaaactcgaatagtcccggctgtcgatcagctacctgatcgggatcgtggacgccacgaaacgatccgcaacgacaccacttggcacccgtcaagccaggcagtctgatcgatttctcggctaggcacatgatacactccggcaagtggaacccccaccgacagcgtcaatcgcatatgggctcggctcgagactaggatacaatcgccgatgtcatcaacacgggggttaggctgttcgatatgggactttggtcgtactgtcaatcgatgtataggccaaaggaatcgggagaccaccgactatctgggctacgtggctgtacactccgtttctgctcatgttgctggtgtgaacggtatgatctaaagcttatatcactacaccggcattgaatctgattctaattgcacactcgagcgacgttgttgcccctactacatcagggttctagggtgcagcctagcggaattccgcagcattccggtagcgacgaacgcaagcccttatccagtgaaacgaaccgggaaacatcaggtgcagacgcaatgatgaacaccggtgacatcggttgatccctgtagtatagtaaacttcaaggtcgccattgctgaacatgcgatccaaaacaagccgtccccagatcgccatcttgagccacgtcggtcaagttacaagaaggtccccatgcgacagagtttgccttgcacaggtcccatagcgaatatgtaaacccgactttcaggttaccggggtttaggaacacgtcctttgaaccgtcgttcctcgctcgattgacggtaccgtactccagaaatgaaccattaccgccgttatcgtccataccgtcgcgaggtttccaatctggcatcttcgttgggtcccattgcgctgtgagaggctgcgagtcgtgctgagacgtcatcatacatgattggggtgatacgtcaactactcaccctcttgggcgcttgagtcagcacagccgcgacttgctgtatgtctgtctcggtacatttttccaaggcgatgtagtggaccgatgagttagttacaagcttctaggcccgctccagcgatccttcatctcgcgatcgaaaatccttttcggctattttggcagctctccagtaccaaggcattgggactccggtttgatgaagtttgtcaacaagtgcacatcgcaggtccaaggattgactagatccgcaactctatctgggtgcccgatccacgttgcgcgaatgaccgagttcatgatcttgtatgcttgatagtctccgaaattgtcaggcgactcccccaggtccggccaaacaatgttcgcctgagtaatgttcggaaacgcctgatttccaaaacattgtgacggctcgtagaccagggtccgataaatctgtcgctcggaaatggatgcttcgttggccggcagaagggaggggggtgggcgactttgtggaatgactaacgtcaggagcaccgcttacgtgacaaatcggcgagtgcgactgaagagagcactatcaatgcgccgaacaaggacaacgtcaccattttgtggcgagtctgatttgaaaaggtgataagaaattccactcaaccatggatcccgattgcgcaagactggatcggtacttatatcaagtcgatcaggctgggcctcgcttggacaacaaaggggctcgaaaggggttcacggagctgagaccgagctcctttctccatctcagacgcgtatcagctcagagaagcaccttttcggtcaaatgtgtcaggacgggcgttctgttctgtcaaacgtgttcttgagcgtctcgcttgatccgctgcttggggaactaagttgatgtggtagcgtctcggtggtggtacaacgatggatctctaaattacatgatactgcaccagaggccgggtgcattctgttccttttgctctttcttcgttggtagcgggacaaccgacaccatgcgggcgtgtattgggaccagacagccatctggcaacatcgtactgtatcgaaattttcagctctacttgtctagaatcgcagagattcggtggcatacccaggcggtagatacatcccgtaatgtaacacctagacaacggaaacgtgtgagccatcgccccgaggcagaatctccatacgtcaaatcacagtgttcgatggaatggccatgccgagcgggaacatagtccctgccgccacccaggtgcctttgcaagtctttgcattgacgtttttgatgtcagtcttgtccccgtattcaggctcgggccagagtggtactgtttgatcggtgccgaacgccgtgtcattattgactatcgccactgtgcttgggaacggtactgcctctcgccgatccgaagtaccgcgggagcgtgaagaagaggaaacctcagcatccttcgacgacgacccaccctctttcgaccgactcgaaggcttggtggaagatgacccggaacgactgctattcgaggtctttgttgcggatcttgacgaggacatgttcttggggatgcttgtcggactgtactgcgcttgctgtcattttgctatgcggaaatgtttagacggccacactgtaacataaatgttggctcagcagccgacgtttcgagtgaaacgcccggtgttttagggtctacaaagggattcgacgcccctgacgtaaggggtacttcctcgcgcggtgtcgtcagggaactcggaatcaggtcgccgtcaaccgatccgacgagccggaccgtggctccgcccaatcgccgtgtgacgtgttcgacaggagatctacggcccgggcccggcccgagtgttcaaggggtaaagcttcggacccgagcgcgacggatcgatctgctgacgaacccaaatcgaagcgcgactgcgcctgatcagtttgcttccgctgccacgaaggcgatgacgtcgattgactgatgacgggtcaacaacccaatcgatcgagacgctcaacttgatcaaacatatctatacagcctcgaccttgagcagtatccttcgccagagatacaagcagatcgtcggaatcactcaacactgatcttagacaatcttaaaaatactactatcatgcctgtcgataaaggaaccaccaccgtcaagctttcgctcccctcggtcagttcgatccacggacggagatcctctagatggcacggttgaccgaacgttcgctcatttctcattcttagggtgaatccgcagagatctagtgagttgtaccagcgaagatctcgttgttgaagacagacgctgaaccggctccgacatagctactacggtgctaccgttacgtcctggatcggaggtggaaaggaaaggctcttcctgagtaacaaggccgcgctagatggctctaaggcggtgagtatcacgcttcaccgctactgtatgacctacgggttgctgagtagcgttctacgatatagatccgcgggggaattcccatctgctgggtgagtctgttcggctcctgcctcgccaacctttagctgacgacgcagggcatcgcctctagcccaactttggacctccgccttcggcagatgatgagaccttgatctaccactccaagctcgctcagcatggattcgccaggaatcagacttgggtcagtctacagcgtatacgacggcctttcccccaccagctagcctgacaccctgccctgtgccgcctcgtgcagaccctcgacagcgttgtcatggaccgtccggaaggtgtctcggtcaggttcagtcagtacaactgtgctcttgagacatgttggcgagcctgactcgatattgcgcattacaatacagccctggatccgaccccgtcgatcatcgctcaattcccgtacccattccacctgtcctacgtcgtcaccctaaccaagcacgaactctcgaccgacctccacgtcgtcaacccttcttctaccgactctttgctcgctgctgcccagacggtatctgatgccgtcacttcggctctgcccagggcgctcactggatccgatgccaaacctcaagacaagggactcaggttccaggctctgttccacacctacctcaaggtctctgactcgaccaccgtcaaggcgcaagggcttcgaagcggactcaactacgtcgataagatcaagggcggctcaaaggagacctggcaagggggtgacctcatgtttgacgaagcggtcgacaggtaagctatcaagaccaagtcgcggggtgaccggtggctgacaaccggatcggggctatccagggtatactacggcaagggcaaagatgatattgtgctcatcgacggctcggacaagttgacagtccactcggttgagatgccagagtcagtggatacctaggggggacctcgatgttttgctcaacgctgacaacatctcgcttgagcaacatcttagtatcactacctggaacccggccgaaggcgctgccaaaatcgctgacatggaggaaggcggcgagaagcgttacgtctgcctcgaaccgggtcgagttgatggtcaccataccttacagcctggtcaggagctcttgatgcagcaagtcttgaggatcgagtaagattctcaaacgaaaccgactctcggataattcactcgcgaaggttgggttcgagtaaagggcaccgagcggcgagctcatctgaatcaagagtaatcgaacttgcagacgtaatacaatcgatgccattcagatcgcccgcctcgagatccatcagatcctcgtataagtcttgctatagggcgacgtcgggcagctcctgaccgtcttctcctttcgcccgttgggcggagattaagacacaaatccatcggaccccttcggggcctgctcgccatgcgtgcaaagtccctctttgaacgatgacatcacctgctttcgtgatcgtctcgacaacgccgccctgaccgtccggcgtgatcaacgtcacttcccctttaacgatgatgttgtagtcgattgaaggagtgcggtgcatgccgaccgcgacgttcggtgcaagatcggttacctggagattactgccgccaggaatcaccagtctcccacgagcttcgtgggcctcgtcacggtcgagaccgtaggtgttgacggcggggtgcacattggtccatatcggagcgatccacgcttcggggccggtcgggttctcgggagttcgaactgcacggggttcgatctcgtcggtgtgcacgatcactgggttatcatacgtcccttcgactggaccatgactggtaaggatacggcgttgacttccaaagagagacattggtgtgtggcagcaaaagagtctggctaaccccgtgatagcgaaattcgagctgatggcttgctctatatagtcgattgctctggtaacaacttcggggctacatcggtccgtcaaaccaccgaactcgcacgcgtgagaacaggattctaatggcgaagtgatgacgtttcgaggcacggacctgtcgactactgccatgcggaagcggacatatgtttcgcgcttcgatctcggtgctataacgcttcggggttaatccgggcgcgagaatcaccagtgcggggtgcggaaaaagcaccgcggattgcctacgattcgatccgattcttcgggttcacatcgatcaaggttttcgtgatcgtcaagtccccttgccaagcgatatttagatctgcgatgtggggtcccaatctttaatcagataatcaacagcgcggtagagtcaggaaagcctccgttgtcggtcgtctaatcctgttgggcttggcagagccgtcacagaaagctcgtctggttccgttcacaaccctcccgctcagatgaaaaaaagggagatcagacggctgatccgcacgtaccgtatatagggaacactgccgtcgatcgctatctgataaccaaatcgatcccgttcgcatcgtcaatctcgaaatcgtacgaagatctgtcgtatagcgatgtttggctttacaaaacgagccttgagctcgtctatctcggctcatcaacaaccagaatctgacgaatatgcatcatctcaagaagctggacttgttgaagagcagaaggaaaagcgtttcgtccgtaaactcgactggattctcgtaacttgggcattcttcgcataccttctgaaagtgagtcatttcgagatgcgtactcgcgagatcgaatctgatatgatgctactgctgggcttcggtcggacagatgattgatggaaccaattataagacggcatatgcatcgggtatgaaggaagaggtgcgtcgatccgcatcgcgtcggcgaagttcgactgtcccgttcgcttgcttatcagactgttcagctcaacatgacgggcaatgaactcaattacatggacatttattaccgaatcggctatgccatctttttgatgccgtgtcagatcatcttgactaaagtcaggcctaattggtggctaccttcgatggagatggcttggggactcatgacaggtatgtatccagcattccgtgccaagtgtgaatttcactgataagggagcacccacgtcagctttgatggccgccgctaaagatgttcggatcatgtacgcgctgcgattcttcatcggggttttcgaggccagttcgtaccccgggatcatatctattctctgcaattggtagtgagtaccgggaaggagattaacagcatatcaaggcgggactctgatcatacatcaccttctttcgccgacagcactcctcgcgaagtaggggctaggattgtcatcttcagtgcatcctatccagtctcagcgatgttcgtctctgccatgcaagccagcttatccaagacgctcgacggacactccggtctatccggctggcgatggctgtgagttcagacgacggggtacgtgtcactgggcgcctgattcaccgatgatttgcatatcgtagcttcatcttcaacgcgatcatgacgttcattgttgcaggggcgggatacctcatggtctgtctgagcgagcgacaagcgtctaagcaaatcattgacattcatacaacggacaggttcctgactccccaggcaataccaagatattttggatgtccgaacaagacaacaaaatcgctagagatcgaatggatcgcgccgagaggttaccttccaccgtaagctgcgcgtcgcgagggatttgcactgagtcactaatagtactacttgtcgcagcgctactcatgggcatttgtcaagagtatcttcaagaatccgttcacctatgcattcgtctttgcgtacaggtgagattgcaagagtatctttctgggtctgaccgcgtgactaaacagcattgcatatagcacatggagctggagtcaggattctaacggatggttcatcctctttttggtcagctcagtccgagactcggcgtggagcaagctcgactaagcgacgactcgatgcggtcccacagaaagcggtcaaaaacggcgatggaacgaagcgcttcgacatcgccgagatcaacgcaatcagtattcccgcctatgcactcatgctcgtagccatgttgatctttgcgtacctgcattccgtcaccggctggcacaccacatgggtcttggttcaagaggtcagtgaaggcatgtccgcatgcttctgtgcctcggctgatcaagagactggtctgaaacagatgaccctgctcattggactcgtcatactggtggtgagttggatatcaccacgtgaaataccacgcagaaaagctaataattcccgtgtcttcgaaggtttggccgcaagcgtttgcggccaaaatggtggcgttcttcctactgttttgttcttgcgcggttggccccattctcatcgtgagcaatccccgcttcattccgcaggtcctggcactgatgcctttgagattaggcttggatgtcggaatacttcaagaccccagaagagcgaggcatcgtgatcgggctagccgtgacctttgtttttcccatgtctgcgtggatgtctcgtaagtttgcccttcccctacctctttttggtacagcgcgacgaaccttgacttgccaacccaacagtcgtcttttatccggcaaagtacgctccactttaccctatcggctacaaggcagcggtaggctttgcagtcgcgtgcatgctgttcacattggctttcaaatggttgtctttgcgagagccggctgtgcggatcactaccggagctacccacccagccgaggactcagatgggcgcgtcagtccggacaatcaggaaaagacgggcgatgccgtaaaaggggacatgcctatcgtacccacactccgagcgtgaagctacttgtacaaggggatcaagggacattgaagattgagaatatagagtctgccactgctttgtcctcgtaccatttggtctaggaaaccgccccgttcgttcgcttgatcatctcccagttgaccgaggggtcaagcttcatcttcatggtatcaagatcggccacctctgaggtctcgtgaccggaccaacccttgaaaccgagacccagatctcgttgcatagccatccagggatctgcatcccccaatgtggtcgattccccggggtgggtagcgtactcgcgccaggcaacgtctggcaggatatgaatccgtttgccatctttctccctggcggtactcttgccgcggggtgcgtctcccatgggcaaaccactttttggatccaaagcttgctgatctttgtcccatggggtgccgtatttcacatctccagacttgccgtgctggtgttgtgacaaaatcttgccggaagaatcggtaagcggattgtggtcaacgatctgccctccatagtccataacgggtcgaagccaattcccaagaccttctccttcggcacggcgttctcgttcgaattgccactttctcacctcggccagacgatcttcgtcgcgcttctcgtggtcgctcttttgcggcttgccagtctttggatcgatcttggcctcgggtgccggttccttgtggttgataattggtcccccggcacacgcattgagtggaagaaaagactcaaccagcatgaagcagtgctgcaacggccaagcgcgagggttagacgttaagctgaccaacgatgagcgggctcttggtcgaactcacatagcgtctcggacgatacatagtcttggccacttctacctcgttccttgcattttggagctttcgccaggcgtcgatcttgcctttttcttccccttgtgcttgtttcaggcgtcgctcagccgagactgccttggcaagagatttttttttctcctcgtcgatccggggttcagccgtaaagtcggtcgtttcgcacatcaaaaaaacggcaaagatgatcttaacctgcaaaccaatccacgcgagggtagcatgagcgctatgtgggacgctgacgatggcgttgagggtcacgtacgattggccagtatgtcagtgtttggatcatgctgccgagagtgactagttcacaagtatcggtgaaaactatcacagtccaatatgacaacctgtcgttgtatactgatttgagtgactccatcatgctggaaagcgtatgttacccagtaggcacttaccatgtcgcacgtagtttgggttcgcgcgcattctgtagggatttcatcgtgtggtatattggcatcaggtagacgagcgggtacggcagaacaaacagcaaagatcgcggcatcgttgtgctggatgacatcattcacgtcagaactttagtcgagtgacgaagagctgcggcttactacagaatcaaatgggccatcacaaaaattgcaacccatagtgtctcgtcgcttccgaacagcttggcgaaatcatggatgggtgggcaggttttggcaatctatatggtgcagcaaccttcgtgaatggttatcctggacgattagggggttcgtggactcacagctccagtgatactacttttaaaagtctcaccttcggtctgcgcagtagcggctttcttggacgattcaccggacgacatgctgaggcggtgatcaaggcgaggtggttggttcctaggcctggaagggtcgcatttgcagtgtgtacaagcgacaggacgcagcttatgtgtttcgtgctcggtgcttgacacatgaaacgaacagatttcctttatgctctgcaacgcctccggcagtctcgcgtgtagcggggcatgtcacgcgtcaagtttcaagccgattcgcaggccaaagatgaggaagcggcgtcgagccacgcaaagcgatgacgcgtgcgatgcggaagtgaagccgattcgaactcgacggacatcgtcacgaaaatcgtctccgcgtaatcacttcgctcgcggttcctagttggctgaacgaatcgaacaaaagcgatctcctggatcaaacgaagattccttttgttcacccctctcgggcggccaaagagagttacgccgttattcactgcgcaagcgattagaaactgacggtagccaagtcatatacatacatagagtcggctggacaaagacgcactgtacacccgcccagcatggtcgtaatcagactggtcaaatcgtctggctcgtatcgttgcttcccggaaggcctttgcgggaaatataacttagtggtccgacgacgaacggccaacaatcccgacccaacatccccatgagcatcgagtcacctcgccgtaaggctcgaccttcgcccattcaagttcccgcttctccctcgaacgacactcgcatcggacgaccgatcgcgacttctactgggatcatttcggctcgtcgaaagctctcgctggatccgaccccatccacagctgcgcccggcatcattggaagcgagaccccaaggaaacgcactttgcatagccatttgcccgctcccaaatcggctgcggcaaacttcgctcagcagcgaggtatcagcactgtcactgtccgcacggccttgccactgagcccccgaaccccgaccgatgggagtccttcacctcgatctgtcaacgctgtctcggacagctccgcaatatcaccggctcttgcatcacccctcaagacgagcggattgaagagtagccgtacagtcgaggtcgattaccttcgaaacgagatggaaagggcgatgagacttgccgcagtgaagagtactgatggtgagacggatgttaggaaggatagtaagtcgcaagtcagtcgattaaagtctgcggggccgactcctcatgaccccgattggttcttctcagtcatcctttgcaaattttaccacacgcccggactcacctgtacctctcgcccttgccgatttgtccacgactttacgcctagttcccccatactctcacccaagacgatctcgttctcgaaggatacggctgatccaccgggtaccgtagagatcatcgagcagttccctatgagtgggggaggctctggacccggttccaaacatagcaaggaaaagtaccgcaccgtcaaatgtcgcgattgggaggccaagggcgactgtccttacggtgaattttgctcgttccttcatgacgacttggttcgatccgtccagggggacgaagggttgcatgacagtgtcaaaggcgaggtgaatttgagcctcgatagcacagttccgccaacgctcgccgggcgtccgaaatccttcaacggctccaatatcatcgttcctgatctccgatggactcaagacgacggtctgaccgtcagcaaccccaccacggctaccaagcctaactttcgggacgttgcagataaattggtgcagaccatctcaaagtcccttgctgccgaaagcgatgcaacacgcgggaacggtgggatcgcttctccagcctcgcagtatgcttcgatccctccaagatctacgtggaacctgggaccgccccgcatgctagcgcctagcagtgccgtacaaggggtctctccggatcttcccatatcggcctatactttttcgaccgactctcctggtactccgtatgatcccgcgaatgaccaccacgaaggggacgcgggaatgagcgactcggatggtccggaggaagcaatcgacattgcacagaccgagcagcacgcagctgtcctgcgcaagcaggcaatcagcgatgagatactgcacagaacggacatggtactccctccttatatacaaccggttcacgactacgccgcttatccctggcctatcgaacgcctctatccgcaagcggtaagcgctacgtgggacgccatcctcaaggatcccagtcagctcggaccgcaaggcaaagatctggagcttgaagcccgcagacttgttgcgcagaaactcgcccggatggtcaaagggggcagattgccgccgcaacaagttcaggaaagaataaattatcggagtgagtcacacgagcggtctttcgatgaatcgacttttgaccttggactgatcgattcttgactgtagccaaaccgtgcaaattctacgcgatgggcgcttgtccccgcggcgtttcctgctcctagtgaggaacagtgttccctacaggccttgtccctgactgaccggtcggcacgtgatagtttacacgacccctctaacaaaggcctgccagctccgcagccgagagacgaaaagtcaatcaacagtgagtcgaccgcgtatcgtctcgtcgcttccagtcgcttcaattcacaacacgccctacgtcttgtgcgcagaactaccatgcaaagtgcgtttagatttacggatagcaccatcactggccactgacatcggttcgccggactgtgcagttcttcaataccagcgagggttgtcgtgcccaagcgtgcccctttctgcatgttcgcgtagtgcctttcggggcaacactggcagttcgacccaggccgtggaggagtaagtaaacttacgtcgagtagcaaggtcgagatctcggtcggttgatcgcgttttgctttgtctcttgcagcccggccctgcagagtgggtgctaaatccgatttacgacaaagtcccgcgagactgactacatcctttgacctgaaaccagcatttccaaactggaacatgcgttgcaggagagcaatgccatttcgcacattatttggagcagcagaagaaccccgagcccaagaaaatttgtgctttttggggtagcgattccgggtgcaagcttggtgatgagtgcaagtttgcgcatgaacggactgtatcttagatgtacatatatatatacagccacatggagtgcgcagactatagtactttgcctggcaagacagagacacttgtggatctagacgacattccttgtgcgattttgggcaatcaatgagatcaatagccactgtataacgatcggtgatccatcgcacttggtatttgatgaacacgtataacaatgctagccgaaatgtccccatgcataggcaagggacatcgagggcggtacgctacgaatcgacagatcgatcgcgacttcagcgaatctaagagctctcccaaacactaagccgcaggaaaaaataaatctgtagtgatactgatgttatcggtttacgaagcagccaactagtttgttgtccttaggggcttccggagtacctcactgcttactgttccccagggctcccctccctttcacaccaacacagaggccatttatccaggccatttgcaaacaaaaagcaaacgagaatatacttgaggcccaagggatagcccgataaggttacatgtaagcttagccgacaggcgtataggccatcagtcatcagtctcttactacgggagcagtatgaccattatcgtgctttttgtcttttgtcagaggaatgtgaaagccaagatggaaaaaagtccaagtactttgcccatgatggctgaatccactctacattttacttgatctcgagagtcttttttgatcaggtctagaataagagggagttcgatataacgcacatgaaacaccttcactggttaaagtgggtccttatcttgagattgcagggtaaagtgactagtgggtaggttacagatttaatttgcgggattggtgataatcatctatttacagactcgtatctgtacagagtgcgttagaagtgattgtgaatttacaatgggccggcgcaaaaatcgattaggtcattaatcgtgtacctgcagactttcaacaagaggggctcttgacctacttgctgagaaacattgcaaagagccagagcggcgatctgtgaggctcctgaatccccttcaaataagattatagcgtgaaagatgtatattgcgcagtgtcatacactaacacacttactcgcaggacctttggcctcgtactcctagataatcacgaggctgtgatggtaggatccagagggatggaggacgagaattacttcgggttacttcgggttacttcgggttacttcgggttacttcgctcatcttctaaccacatgacctgagcacatctttgcatgcatatagtcataacgaagattggccgcatgcagtatatttcttcctgacattcccaagcctttccgtgctctataatttcgcttgtctctcctacctgtagatatccgaaaggcagctttatctctaatggtactatatgtgtttaggcaattatgtttgattgtgtcagcttcccttttaagaaaacttaaggctctgtgcacttagggcctgctctcacccaaatcgcatccagacagacacagacaccggtcgcttacctcatcctcagcaagcagtttttccataattacttggagaccaatctctctgttttggtggaatctatcattcatagctatatcctccccaaaatgtacctggggagaaaaatgcaatggcggacttttttctattcatataaccaatattctgactgtaacgcattcatgctgtcaatgactttccatgtcgcatacacagtactttgttatggtctctatgcttgtgatttaagatctgatcagtctgtcgaggtcgtgggattttgaaacatgtgtatttagacagtcaagacaaatatgtgcgtgtagaaaagagttgcaacactaagagcactaccatgtccgagcgtgataggtgtcctggtaattgtggtgttagcatatagatccatgcctgccatctacgatatagctacgcaatgtccctttgggtgaagactttcagatggcagaaggcagcaggttgtaattggagacgtacagcaagtttattgctgacgttgaacccagagctgacatcggatcttctcggtttacaacttgcttttctcagtggggatctgttctacaacgatgacatcgcaatgtatgagactctgttcggtagcaagctgaactaacacgtcgtgctccctcttcactgttgcaaataggcatgccatgattggctcatggatgcaggaagcaatctcaaccacaaagtaaacagaggaagcaaacaggaagcaaacaggaggcaaacccatggaacatactggaagatctatttttgccactgaggcattattgccaatgggtggcaaatctgaggtacttctgctattggctggaagacatgagggactattgccaccaatggcagaacccctcaaatgtgaacagttcatactgacaagctcttagtcagagctctgagtcatcatttgccaccatttgccaccttccagaaaagtatatataggagaccatttgggtctcatttcctttcccttctcatgtactactttacttttatgcaaggaacattgattccccttcacaacaaggcaagatcagcactagcaatagaccattgctattgcctagacccatcaagtaaccaatctttgtggatctagttgttatttcacaacattcactatcaaggtccactattgttctctcgcatggcgccttttgtcgcccatatttgcactgaacaacaaaattaaaggaacttctattgcccgtatctgtcatatcgtccacaacatatacattccacctttcatcaattttaacccttgtatcacatgtcgatattcttgccatgcaaactaccaaacagtgatctgcccaacgtccaacattcaattgaaagatcgtagggcccggcgatgcactacggcggtgtggagtgacaactgagtccaccaaggtcagtcatctgttgcagtacatgaagtaattagagcttgaggcctatttggccttttattcattatttgtcataaatttgtagctaatgcccttcaagtctcttgtgaggtacgtaaggtgtttggtacagactggttcatgtgaatcgctggtatgaaagaattccagatgatcaagtctaggttactgcgcgtcggaggatagggaaagatgttatcctggcagacagtcgccttgagtgtgcagtgctcgtatcgctgcgatcgaaatggcgcaggacgttgtgaataaaaccaaagctggccgtcagacattgatcagcatatcaaccccatatttgcttgttctgtgcaaaagcctctggcaagtgttaatgcttatgaatggtgatgttcaaatacccctgcctgcagcaattgttaccacgaaacatccctaaccgatccgccgttacaacgttcatgcgaaatcctttgagtacaaaaggaacgcttgccgccacggcccccttgtggctagaccggcaaatttgtgactgggaagataatttgagaccgcagacagtaccactaagcgttgggtgcgttgatacagcttgatgtttgatcattcgtacaacattgtctccattcgtgattgtatcaatgtcatttgtgttttctgatgcgttttctgtcccgcaagggtcatgctttaacacgggcctaaccaattcccagatatctattgtttcccatagaaatcactaggtaagtcatgtaaactattctaaaacaactgaaggtaacatacctattgtttcccatagaaatcaggtattgatactaggagagtttataagtggtttcgctgttctataggcgtaggggcgactcgtgcgttcgtctagtcacgtagcgagatcatcaagatatagcccatagacacgttactatttgctgttatgcagttgtaccctacacaagcagtttaccttacttacgtctgtggtcagagttgtaatggatgtccttcttccacatccaaagataatacatgaagtagtcaaggaggccatagttcaaatagttcatacctaggatctcgtaattacaaccaagctgttgatgcgttattcacacttttcaccctttgggacgacagtgcctgcctcctcaaagagaagatggaaggctcaaatagacccggtgtagactaaggccatatagcggtgatgaaaggcatcctgtacagtgaggccatatcaaaggtcatctgcagtaagccacgatgttaagacgtgacccttgctgaaaggcctctgagcccttgcgtcttgtttcagaatgatccagccagctgacgcagaggattagtatcagcattgtcatgactatcggtatcataatcagaatgatcattattattactattggcatgggaactagtctcagtttctgtcgacacaacaaatttgatgaatgtatctttccggaatctcctagtcattttgcattccccttgttgggcgtattgctctcaggaggatcatctttcattattacctcacactttacatgactaccgttcaagatgatcatgccacgctgagcaatcctgtccttgtcaaatacttcatgatcagacattgacaatcagccaaatagattgtgcttctaattttgttctgccttatcacaatatacatctaactcatggttcttgataagtacaagtactgtgattgttgcacatatcctgttgcaaataggcatgccatgattggttcatggatgcaggaagcaatctcaagcacaaagggtcaacatgtgactagaatcacatgttgtgactggagccacacatctgtgactggagtcacgcatctgtgactggagtcacgcatctgtgactggaatcacgcttatgcaactggagtcacgtatctgtgactggggtcacgcttatgcaactggagttgcacatcagtgactcatttgcgactggagttgcacttatgcgtctgagtcgcaaattggcaacaagcctagttgcaagtacactggaaggacactaggaggacatgctcatcagaatagtatatataggagaccatctggcctcatttcttttccctctaccatgtactactttacttttatacaagcaatattgatcatcctttcacaacaaagcatcatctatcatctgcaagagacaatagacatagtgactacaaccattaccaaggagtggctaaacaccattggcagcagccaatatcacaacatgtccgtggtgtgtctctctcaaacgcagcagcgaatcagaagtttgttcgacgggacatcaatgatacttgcgcagtataagaaaaatgactctatattagtatcttccatacccgcccttgcgtgcgacgcaagtctgcagcgtctcaacagacttacctatagcttcacagatgtgcgctgcagtcctctttcagcctgcgggcagataaggggtgtgagtgtcgtaaagcttccatcgcaaaaacgccgaagatgtagacacagtaacataagtgatatacttgatggctgcaatgagataatgagcgcccctgccaaagaagaagaaaagctttgcaagactatactgtatttgcgatttggggactgaaacagcaagctgtgatcactgctctcagatcatcagcgtcgctacactgctggcagaaagattcagcccgaaacgatcatatatatagcttcgctcaaagcatggtatttgcaatctgaatatcgatcaactgctggtgtattattgtatagtcaaagatttagcaatccttgcccttgcagcactatatcgtatgtctccatgtgcttcaacgcctagacacatgtgtatgcatctaagatacctgaagcagagtttggtaactatgtcatatcactgacgtgagttgcatcttctgagacttgggcgtctatcgtttgacatctccagtcctcgaacctccccaaccatcatatcacccgcacatgatatgtacgcatagtgcagttctgaaaagctctttggggcaagattggatgtggcgtcagtcatggaatggctactatacgcaccagtctcgggatcgattcatacatgtatgccaccccacagatgcacatatccttttcgctaattgtcctcgtccggaacgcgggctacatcacatgcggaaatgggtctgtgatcacgcttctggtcgtcattcccggaaactcgagatccgcagcgcagactcccaattctcgcgtcgcggatctcatcagggctcgaataccccgtggacaagtcctgccaaagcagtgagtgtgacgcttttaggctggcaatcatcaacaaggccccggctatgtatagcaaaacatatcataaaagtgtttccctacttgcgccttactagtatacggggcatatggaatgcttataacatgccaaatccccttgcctaaactagcgaggttagctagaggttgatagatctttgtggagacaggcacttgtttctatcgttcagtttttaacgttcgccagcgcgtgtcccatgggaaaagtgacatgagagataacactatgataggtcatatgtggaatgtacatgaaaaatcatagatctgactcgcgcggacgttcagaacgttgtatagaatcttgaatatgaggtagtctcatgcaatattgttgcacctgaaagataatgctaggtagcagacccaacctaggagctgctgaaagctggccgtcacgatactggtttgcaaaaatatactcctgatctgagactatggcaccacttgtaatttacaggatgtgaagcacctgaacgaaggtggttgttctctgtacttgacaaggcctcgaggtggatcccaaacaacctatgattgattactgtggatatcccataaggacaaataggatattgagtgcaatcaattgtcgatttgtttcagacagtggttctcagggatggttgtatggtgctctttcatcggtcattactatgcaattgcgcgcgtacttcagcgtgtacttcttctcacctctttcaaatcgcgaagctaactgaagcacttctatctcactcacatcatttcaggcttgacatcgtcatgacagcaaactaggctttgacggctcttacatgatgcatccaggacagccacaagtctgtctgaaccagatgcgtgcttgatgatcaaagtaaggtccaagctggatttatgaagcgttcaacgatagggcggccgtgtgattactttgcaagacgtactgtgtgtactcccaggggtcggatataccttcatacatatatttgtctaagcttggcttggctcagtcctaatccttgcgtcatgatctacgttcagacagatacgctatagttgggcatgtggaaatcgatcagataatcacaatgatatgacatccagaagtacgcagcttttgacgatacgcaacatgtgtatctcaatctgtacaaagcagtatcatcacatataccattgcaccttctggtccttcccagttgatgactatctgtcagtacacaattgaagcagagactggtgtccttcctggagcctgatcttttgaccagatagtagcctcgaagtactctggttgttctgaattgatcgacagaaagcttgcttctttccctttagcaataaggtgacgagtaaatcttcatgtgccggtcaccggtgaggaagttctcgtagggcttcttgaagtagacgtaggaaactaaggaggggtctctcatatattatccagtgcagccgaatctggtccactagatccgtacacaatggaaagcggagctgaaggtgtgatcctcacagatagtggggttggttgaggcctcccaaaaacgattggatcatgctacttacgcaaacctgggccatgagcccatgaaacatttgaggaattccttcagcataaccactcgcttgcgccaaagagaataaacatatcgttgattctcgcgcattcgagcacaagctcctcttcaagtctcccgcttagcggacccaactaggtttaccgaaactgtgtcgtcgggtgtcacatcgcggttgactgcggctgatacttgcgacgatcctagcgatagacgtcctctgatctcaatacaagaatttatacagaggatgaacatattatcatttgcctggattaagtgacgaaactgacaacactggacccagtatccctgtctctctcgctggccctccagccgatcgcactccgggtccggtctagtcttaaaccagagcccgttgttgcaggagcgatgtagagggaatatgccgaagtctactcagagcgcctctgtaggcagtatggtatagatatgctggagtagttgactgtcgaatcggatgacctgaaagcctgaccaaagtgttgacggaaacgtgatgattacgcttttggtgttccaagtatctgcattgctacatgacaagtttgctctcgtctagctatgtacccagcgtgaaaagaaggcggcatcgtactacattgttgaacttatttcctgctaagactcttcttttgctgccttccgtgctacctgactccacatcacggatccaacgcgcctagactgggcgatcaggtagcaaagagtcgcatcgactctcgttactatgatgctcagatagcgagtctcccattggaaattgcaaagtgaaagcacaaggtacgaagtaaagaccaccacctcacttgagctgcgttgggaatatgacactttttcagtcgattcgtcacggtatccttcggcaatctgcgagactcaggattgatttgcagcatagaattggtgtcgtattcgaagatatcttttcctatcgcagcgttcgtcccgactgccatggctcaggggtttatgcggatctcatctccttccgctttgatgtatatttcatcactctagacacgagcagaccgcaatagcggaaagctctttctacttagggtgaccatgagaaacgattcgatgctggacgaaaccacagttgtaatatggaactcaatttgagacttgtgcattaaataccttaccaagggttatgaagcaaagtatcgttggcctatcagatcggcttacgcatctgacacacctttccttcttgacgtttcacctgtctgaatcaagagatctttttcgactactgtttgatcggtatctgccaagggatagggttgcttagagggttcttcctggtaatttggggtgtcacccttgagtgatggtgtgttgtcaaacgtcaaagtgtcagggctagatagaagtcttgtgtcagaggtaattttggcttttgtgatcaactgttgcaacccatgtttaggtcagttctgatgtccgccggtagcaagtgactaagtgctaggtaacatatacagaaagaaatggtagaagagtcagcttccatacaataggcccataacctttcaaatcaataatatcaagatcctttttgtcttctcatcaacaagaccggacagattcacctaaagaccgcgtctacaccctcacactctctattcagaaatgattgcgaatcatgctgccaatacagttcacatttcatcctgagcgcgtggtccggtagcccacttgataccaacagtaagctggagagcctgcccatagaaatgaatcatgagaaatttcgatacgctacaaggggtctatgaatgtaatatgcatttgtgccagtggacccgctacagtatacaacagctaggcttgtcacacagatctcagtagtaatgtgaagaaggcttcgaagtatgtatacggtagtgcagcgggtgcactcacttgctagtgctataacatctggtaaacctcttaaagagcgtctctagaaataaggcaagccaatcgtctcagacctcactcgcccttgcatcgcccagaagcctaagtaatcacattctctgaatgatctcctctttcgggagggatgggtgatgtagttttcgcatggttccatgctgtgtcctttatgatctgagagatccccctctagccttgtttacgatattctcatgagcatgcgttgcatcacaatgtgagaatatttcgcgaataccgccccgcctctttactctttacctttcatatgacctaatctgtggttcctacctcaaagtgtcacagcacaacacagtctcctcaccctatatgatcatcaaacgattttgataacgctttcaagccatgactgcccgtgatatatctccatcacgactgaatagtgagcgggataattgcttgtttatatgaaaagtgccaggacgacaccagagaatcagcccatttaatgataaaaatccaattcctctccaagcaacgcttggtaggtgtgtgtgccgcttagttcctgcccaaaacatggtgtgatattggctgctgccaatggtgtttagccactccttggtaatggttgtagtcactatgtctattgtctcttgcagatgatagatgatgctttgttgtgaaaggatgatcaatattgcttgtataaaagtaaagtagtacatggtagagggaaaagaaatgaggccagatggtctcctatatatactattctgatgagcatgtcctcctagtgtccttccagtgtacttgcaactaggcttgttgccaatttgcgactcagacgcataagtgcaactccagtcgcaaatgagtcactgatgtgcaactccagttgcataagcgtgaccccagtcacagatacgtgactccagttgcataagcgtgattccagtcacagatgcgtgactccagtcacagatgcgtgactccagtcacagatgtgtgactccagtcacaacatgtgattctagtcacatgttgaccctttgtgcttgagattgcttcctgcatccatgaaccaatcatggcacgtctatttgcaacaaaacatctaagttataaccttcatcacagcctttgaaggaagattctgaaagaggtgtaggaacagcgcaacagggtacgattgccgttgtaagcgattgcacatgcaagatctggttatgttcggtccgattcgaagactgcagagttgctaagcataccactggaaaaaaaacaatatatgacatcggactaatgaagagcagaacgcgttgctgcagagccggaagacatcccattatcgcagacgtcaaacgactaactggcgcgaaagtctgtttaagagcttcatgctggattgatgtgttcgacatattgtggccatataagggaggctgtgaggaaaccagccttcacaagaactcaagaagcgaagacaagtagcattcgatgaggtatatcatggctcgggtattgcctttatgatctggcaagatatcatactctgaatatcccaagagccacatgttgcgatctgttgatcacacatcttggtctctcaagcatattgtacattggatgtttattcttggcacaaatggtttcaccttcgattgtggataatcttgcagcgtacacaagagacaacatggattgagacgagcaaaatttgttgctacctctgcgtttctgaaaccgatccgatagagccgtactgtgatgaaccaagctttctttaggggaaagataggtttctcacaactgtttgatccgtctcttgcaattgtctcaacatcttctcctgtaacaatcagttatcttgctctctatgactccaagggaataggcaacaagggtagctaagccttgagggggttggctgttacggcggagcttcgctaagtcgcgtctaatgaatatctgagtgcaaggtcggtatggatcgtaggtagtcacaacaggagtgaagccgagttcggctaatgggagcgaattcggttgggatgatacgaatccgggtttcatgtacagataaggaagtaatgtcgctataggtagctaggatcaaaagcttgttcagtacgaacggtgagacgtctaccacttagcgagtgtcctggattgtaacctcttcacaatacgtcttgaagatgcggtgctgttgcaaatgagtaggcgtaaatagaatgcaatattggaacttgaccttcctagtacaagaatgtcgtctgccggatacggtcaagttctactaagtacatatacaaaaccgaaagtacttgtagcgggtcgagaacaataggcggtccaagaatggtgaagcaaattcggaacaaagagaaccgaattgagagtcgagagtcggacatctaacaaagatgaatcattgtttgctgagtcgagatgtctttgttcggtgtattcggttgtcgaactatgaggtttttgttcgatatccgtcgatgctgctattgttctccgctggtgatgatatcgaatatgcgttgtgtcgattgtagagagggtgacaagaccgcgcgagccgaagtcgaccgcgtaggaaccggatctgcgtcgcttcccgtaaaattggcgcaggttgttggaaatgaaggtgactctgttctggtggaggatcctaaggtagggtcttatcactttgtagtaagatgagtgaagagtgcagaggtagagtagtgtaccctgatccccttcatccttcctcctatatatactcatgagtagactaggagtacaaggataagaggcagccgtacaaagtacaaagtgcaaagtacggaatgtgaaactatgtagaaagtacaagtttctccctgatccttgacacgtaccgcgtggagagaattttctccatcccacacctccaagcgcaatggagctgagacctcctcgacacccttcagatgatcaacagtacaacccaatccgcttactccacacaaatttcatatcacgtcaggcaaagtatctttacaaacgagggtgtatcactgaaaagtggagcaagatgaaggactaggaatagatatgtgctaggtgttggtgttgatcattttctttgtgctgttcacccctttcgtttacaatttccaagagaacaataaaacctctaacccaagtcttattgctagtctttctacgttggcgacatgtatactgcatcaatcattgcttctgcttgtaggatcaccttgtgaaagataaatgtgcaatatacagcatagcaatctactcaatgtccagcactaggctattcgacaacaacatgtgtgaagggcgtggcaacaacaactggcaggtccagccgccatgcctcgagtgtggtttctgacaatgtgggcgtcaatttggagttcattctgtttacctttgtgctacatttgtgatccaatacgcttctagaattttttttctgcattcataggcttctcaatgacagtcggtcagaaatatcacttcttacatggcttagcgtcgtagcactattatcctgacaccccttcgagacaacttataggccactggactgagtctagacatcttgttacagatacactggtcagtggcctctaccgtaattccttgataagctgtgtgtgacttcggttgacaccagaggttgacccaaaagacctggcatagacgcagcttctgtcgtagtcgatagatgacaacaactaacgaagagagcagcagtatctcaacgtctcagatatctcaagtgcttcaccgccattgtcacccgatgtttgagttctaagctataatatgtgaagtacagtcacctctggagctccttgcgaacgtccgcaagtttcaatgtctgagtttagtgctcaactagggaaactctacatactaactacatactagcagagtatgatccgaggttggcagagatatcgttacggtaagaacacgtcaaggtatgtctcgatattagggtatgccaatcgtctgctcgctcagcatcgttgctgcttgtgacgagcctacacacctaatcctccatctcaactcataaccaccatgcttgtggcttatggtttccgaatacaaggattgttgacggccggttccgccgttggtccgctgatccagcagataagctcaatatacaatgtcacttttaccttctttggcaacagtattgtcaaaatccatcattattcttgcgctgttcacaccttctgttctctatgttgcaaactgagcaacaagaccaacaataccaccctgatagtccatctctcttttgttccggaagattcatccttcattactttcactcatggtattaccttgtaatattgtacttgtgcaacctatagcacattgatctactcgatatccaacagagcaagcctacacccagtacgtatttgttgctgataccccctttcagcatgccttttagcggtcttgtagactttattgatcaagtcatagtgaagaaagtgccagctgaagctgagtgagatatgagcaaagtctgctgggaggcacacatctaggtgttctcggtatgcacacacgcagagtcagcacaaagtcaaaatgagtccagaacccaagacagaagtgtttacagcctgaaccttttgtaaagatgcgactgtgatcactcatttgcaaccacaatcacatcttgcggctcctgtcacactattgcaactcagccacagaactgcaacggtggacacacatttgcgactcagtcacatattcgtgactactctagccacaattcttgtatacacacctctagcactttggtgtatatataggagtcccctgaaggaggaaaagcatcccttttttcttctcttatgggaactcagacctcttgagacgagactcaatactcttaccttcactgccttcctcacctttcaccttcaactttcctcaacaaggcttagctacccttgttgcctattcaacaaagacatcaagaaccttagacgtagtgttgagacaactgcaagacggacatcattagctgtaagagcaccttttctctctccgggatctggtattgttacacctttcttcaatattcggttctccacttgacattggtccatggggcaacagacttcagtactgaactctatgtcagccgtggtaagagagcctcctccatccttgagtggtgtgatgatggaccctgcaatgctcagcagcctgaatatcccaaatttggtaatccgtctgtgttgagacacgatcatcctgttttgtgtgtctacggccctgctctgtaaagtggctcttatggcagatgtctcatgtccgagtaggccaatggtggatcaggatctgggatgacaagattacgaacagggcagggactcgatctgcatcaatcttggtgtcttcaattcagtcttcaggacaagaatttgttcaccatatcgtgcaaaatcttgtggctgagctgcttatccatttaccaagtaactgcaccgcagatcaaaagaccccatgcaggatgcaaccggctcggctcatgtcaatcttcatcttcaatctcctctgtcttgtattaatcaggccaggacgtgtcaatgtattaaccagactggcctgaaggtatttggcatcactggaggtgtcgtagcttgacccaacaagtatgtcaagccgagcgattaggtgcacatgagagactgttacagctttataataggttggaagaaaacgattggttagactgctttcaagcttcatcgatgctataccaccgaatgaatgggtaaaagccagcactaggctcgtatgtgtgaatataaaacgttcgcgaaatgatcagactgtacaactcggtgcttgctgaaatatcaccttctcacaggtcaaagtagcccttgcgcttccaccctagcgttgctcgcggagaactcgcttcgccgtttctaagagccggacgtcgattaggatgtcgacttgaaacctcccagctttgcaataggatcatcaaatatcgatagtcaggcctggtcgcgaacgagagctgcgatatataccgtaacgcagaaagcagttcggcggctagtcacatagcatcagaatgagatccccgtagtcaagctatgcatactcacgcaagtcaagttcaactcctccagaggcaaacatcgtttccttctgccgttgtatgtcattattaagagtcaaagattccttagtccatttttgacctgaccgcgcaaagctttcctcgaacttgagtgcgtgtgatgaccaaggaacacgacctgtgatgaaagcggtgtaccaaagatcagtcctggccaaagtgcaagccccggcacgcttaccgtatattagatctatgagcggggagatactcctcagacacgaggcaagacactggagcttcgcttcatggaacgctgaactcacatatcataacgtataaccaactctcaaggtcatctcgacgggagctctctgtgtcatgcgatgcggttcaacatgcaggaataagtgttgcgagcacgttgacttacggcatcggcgactcataaactatgagagccgtcagcttgaggtcacagcagtctcgaccgtggcagtactcactgcctgcgtaccaacacatatggctttttcaatgggtttactgatgtgcgatccatctgcattcctaaaagattgggccatcccgaaactagggaagcaagcttggctgttgtcaacacggcatgccagtcgtgactctaccgatggccacgtactcgatcagaaataacgtgtcccgccgcttcccagtccctagacacatgttctccggcttctggatcaaggtacggactggtcagttgtccattcgctttaccaatttcagatccacctactcacgatgtctcggtgtacgaaacccttgttatgcatatactcgaggctatgaagtaggttcgatccgatccagcttacagtgtcgacgtcccatcctggtcgaattacagctttgtctgagatatttggctgagagccccgctctttgggcgtcttaggccgggagctggcagcaacggcgcaacggggcagcggagctagaccagcacttccagtgactccactagcaatttgcagcaggtgtctccgaaaaagctttccaatatcctgacccaatcgttgcatcactaaagcatggtatggctccttgggtagcgagcttgccggtgatagtggatcaaaagaacgtccccgaagctgtgcagacacacccgagctcgttgtcgttgcggccggactggaaagtggagacttgatgtagtttgaggcgttctggctctctcgaggtgtcgagggaggggtggagggtcgtgacgaagtcgtttttcgcataggtatctccgttcgcgaaaaaagaaagaacttcgctgcgatcgaaatcatgattgctgtcaattaagatcgctactttgagcttgacagtgactcacgaatcccttgacccccctgcaagcgattgagtattccagcttcgtgctgaaggtacgatttcgcaccccccactctttaaaaagatacaagtacatagttgtcaatgaggcaagcgctaggcaccgagagactgcaagcattgtgtgctgaccgttcaagtttgatggcgacctgcttatcccactcgcagtcctcgcagaagcatcctgcttgtatatcctcgtcggattggcgataaccgacacagaccctaccgaagccccctcgaccgacctcccaatcgagactggtctccagaatatgcaaaagttctcgttagtttccgccacggcaacggggcttgcacggttaaaacttcacggaccgagaatagtagcctatgggatcttggctgttgggttaaacttatggcaaagcggattctggtggtctcactcacccttgacgtgaaacgacatgcactggtttggttccgagtcctaggtgaaggcccgtacgagttcataaatgattccgcggaatcggtcgcgagcgatcctgtatcgcggcaccctacgaaccgctctttcgattttgagcggacaaagatgactgtgaataagatatgcaaagacgcagcgttctatactaatgagccgtcaggagacgattcttgtaatagaccgactgacttaccgctctagagggaaggttgcggtggcggagggggagggggcggagaagtagcgggaagaagcaagccatcctatgttcgactgatttgctttcctagtcccgactcctccgccttaggcttgcctgtcgacggctctataaggctatcggggttgatgagcagcgggaacaggcagtcacgtcagtgacgggatataactcgttctttgtcggttttgacagcctccttttatgtccaactccgcgtccatgcttttcagcagcatagcaaagggcatgtgcacgtggcctgcacagcagtccgacctgagaaaagatcgctggaaagcacgtcatgatcactcaagattcaacccggcgtgatagggagcgtacaaacgcttgcgtgcacgtgctgtttcggtctttcagcacgccgatgcgaatgcgttagcggaacaggatcgacttcattttgtgctcagggcagacaagatgggacgaagaggctatagaggcccgagacgacggaggaaagaacgtgaaggagcgcgatgcgggtgatggtacgctaccgatgatcaatatgcattcatacgatcttcagagccaccaagattgcgagaaagacagcgacgtgagcatggctgttcctgtatattctgggcagcgctgaagagggtcggttgaggtctgtaatccccgaagacgaaatttgtgcggtctgtaccgatgattcggtcgatgatccagtgactcccaatgcggagctggcgagcgtattcacggtgtcgccagtgtctgcagctgtaaaagttgggcgttattttctgatacgttcgtatcatgttcctgtcaaagcgtctcactggtagtgcttgttgaattgacctcgccagtgcagtccgatgctgtactcttgattttctggtgagaagggattcgccgagattagcaggttcgacccgactctcttcgctcggccgttcgtacctgtatttcccaacctgcaacatacatattctgagcagcaacatctgcgctgcagacagaaacgcagtcgtacatttgattttcatcatcactcctacaagaagacgaaaagtcagctccagcatgaacgagtcaacgatctggaattactgacgaggggcatgccatagccgcactggagtttaaccgttgaccgcagaccgcaactacgagtttttttgttccattgtgcatcagttgcgatctgtggggaatgacgacttagaacacacataccgcaaccccaatcgtacacaacaacctcgacggcaggtgagggattgacggaagcctgagcgagtacaacgctcattcggcataccagaccgatactgatagacgtgaatggcgacctcatgctgaaattattatcggccggaaggtttagtgtttgaatagttgctcgctggcgtcaagcgactactaacgatacgccactgctggtggataccatccaccgcttatgttgcctctgaggtatgtcggccattcgagacgaaaggcaggtagagcgaacccctgactaaggggcaatatccaaaggaaatttcctgcgagactagcgaaatcgagtctgctacatcagtcgcaggtaggggggccctttgtctagatcagctcctctcccctttgatctcacgcctcatcggtggatcgattccggaccatacccaagacccgaggggtgtcgtgatatctcggaattttatgtttgacgctttcgtcccagcggacgtaatacaaattggagagctggccatagtaaagggttgtgacttgggggaaaaaatagtcttcatgcggtggccattgttgatgccggtgaaagcttgaagatcttgtggtcgaggacttcaactcttgtgtcgcttcaatggagcgacgagcggactctgtgtttggcgatgcgaccgaagatgagcgtgaaatgtctatcgcgagatagctgtatgtggactcacgccgcactgtctggagaagatcggctggctgttgagagttttcatgaggaatgccaaaccgtcgtcaaggagaagtcgagtctgcgtacgggacggcgaaagcgagattccacttcgagtcagcgtcctaccattagatgactgatcaattgctgaaacaactgaccatttcttctggatcggacggcatgtcttgcgtgatgagctttttgaagtcctgaagcgaattatcgagccacgtttgggccaaagagcggtcccggtaatcgtatccttgacagacgacttgtgcctgtggtaaggccggcctgaactcagcaacagtcttcctcgaaagatttccggtgaccaacactcacgatgcgtcttctgtggtatgcgattgcagtctggatgtcgtctgcgacgttcgcgttgaaggcgggttcgaagacggttgagcaggcatcgggaaggttgagggtgtcaaagtcgttatggcggattgccctgggcgtatcgtcgcgcgatggcaatactgatctcccgacacccggcgagtctggtgacgaagtccgagagagacgagatgcgcgattgggcttgggagtgacgtctcgttgatatcgctcagcgcctacaattgcgagcggacagttggtcagcgatgatccaggcccggatacagggaaactcgacgcaccgtggtcttgccctctcccttcgacgctctcgttatcttcgtcatcatcggagctatgatcagtctgatactcgtattcttcctcccggcgggtcggatccgcatctccaaatcgttcgtcaatttctgcgtcgtcgtatcttcctgcgggacttaaagcaagtacgttgaggccggatgctgttttcataagcttattggaagcaaggtatcggccagcgtgagggttcgccaaggcaaactttcgtttcaagccggaaagaacgtcgtggttgggcggcacggaagaagcgctgatttgatccgaggacgagcagggctgggtatcgacggcgggtgggacagatcgcaagggcggcggagaagccggtctggaaggcggcgatggagactgcggcttgatcttgtaaggtaaagggacgtgctgagcgtatttgatgttggtaaaaggattgatattggctcgattaccgatcttgaccttgtaacagagctctcccccgtcgacctttgtcccacaagggttgaaaacgtcctcgagccaactcaggacgtctttagttggcttggatgcggtgaaggagaggtacatgtagtacgggcgatccatgtcagacatgtggtcgagaaggtgatcgtatgaagtgatgggtgccgtcgctgacgtaggctggactgggtcacttgtgagtacagcgtcgagagtcgtttgcttggaaaacttcagggtcattccgggagccagtctcgtatcgatggcgttgcggtcgatctcgcagaccctgtgcgaagcaacgcagctagcacatttgatggattgaatactgcaaggcgagattgtcaaatcagattcaggcaaggaggatgtagtgccgataaagtcaccttgaatcgactggatttgcgcggtagcactttgatttggccttcttgcaacttttgcaagcatactttgcatcgatttgtctcgcaaaagcggtgatgtacgcggctctgatgttgctattcgctttcgccatagaattgacgccagacatcgacgtggttttgccatccgttgatgcaccatcagagctgtcgagagcagacagggtgaagaagagttggacaggaatacgaaatgtggttcgttgatcggtgtttccgacggccgagacgttgactggcaaggtggcctgctttccgagaatagattcgagggaaaggacgtagctacttccgggtgactgagatagtatctcctcgatcgaatcgctaggttcggcgagaatggaccagccagaggggaagagatcgagcggcgaaggtatgacggtcatgatgtcgtgatcggtcgacgatgcgagtcgtgtcgcaaaagaggccaaagcgacgatgcgaactatcgtaacacccttggatcgaccgatatcactagcgagagatgtttgagtagcatgaccagccgtgctcggtagatatgaagatatgacatagtgatgacggacaggatgaatacgatacgaggctcgagaaggtctcccatcaactctcaagggtttgttgttgtgtgcggaatcaaaatttgtaatatcaggcacgggccacggcggcgggacgatccaaacgacgcgtgcgaaagcgaactcgattcgatcgcgatcgccatcccggctccgatcgaagcggagcccaaagcacagtcgctgtcaagattcgaccaaccgcatctcatgtttgtcgagtccgaattatcgatcatccccgccatgaatcgaacctcgctatagaaacaagtatgggcgattcttctgagccatccaggatgctgcgtcggagcacccgtgtaaacagatccgagacggaggactgcaagggtaccacatcaaagtactttcggccggcttcacctctcaaacagaccagggtgctctcgatgaacgatctgtccgaatcggaaaccaagcctgtccctgatcggagcccgatatcgtcttccatcgagctcaagagacgaccagtgacccctccagtcacgcagaggaagcggatcaagctggaggagagcccgtctcccttgcgcgatcatctggtctcgtcgcctttgaccgatcttgaagatgctgcatttctgctgccggccgccagctcttcgggattccattctgtcaagatcgagacggcgagtacatcgcaaaatgcttcgaagagcaaaaaaccgagcatcaagttgaggctcgaaaagcctcacccggccccggcgagatgggaacagcagtacaccttgatcgagcgtatgcgagccaagatcgtagcgcccgtggacaccttgtgagttcaaaccgtaacgaatcaaatcggatgacaagacagccaacccattaggaatcgaactttaggggctgtgacacgccgaacggggagcgtacgagtgatcccaaggtgagcgacccgagtctgttcgctcgtcccatcgcacaacactgtactgcccggttgactgaccactgcaaacacctcagacggtccgctttcacatactcatatcgctcatgctctcatcgcaaaccaaggatcccgtcacatcgcaagccgtcaccaatctacacgaccgtctcccttccggtctgactgcagaatcgttggctgctgcatccgccgaacttgtggcagagtgtatcaacaaggttggattctggcgacgcaagacagagtacatacaagaagccgctcgagcgatcgtggaagggggactggatgacgggcaggatctgccagagggctggaagggcagggacctttcaggagtcgatacgaatgacacttcgggcgatattccgacgacgctaggcggtctttgcaagttgaagggcgttggtccgaagatggcctttttggcattgcagtgtgcctggaacatgtcagtaagcgcggcttctccgatgggcggatagtattgattcgtgtcgcttttgcggtccctttcaaagcaatgctggcaagtcggtgtctgaactacttaagtgagacctgaatactgatggatcagcgggctcgcaccttgaacaggcgtcggtgtcgacgtccacgtgcatcgaatcacaaagtcagtgacatcccttcgcacggcattagcgctgctaacacctgcttgagaccctcgatcaatatagtcgactcggctggcacaagcccaaaacgacagatccagaacagacacggtgagaacttcattgcgcctcgcctcaaagtgtcatcctctggttatcctgacgagcctctccgcgcacgagcagattgaatctgcaatcgtggctgccatcgcatctgttcaagcctatcaatcacgtgctggtcggctttggacaggtcgtttgtctccccgtgggacctcgctgcgacgtatgccttttggccaaggaaaagatgtgtcctgctcgtgtcacgaacggtaactacaagggtcgaaaatcagtaggagtcagcttcgactcggacgtcgaagtcgaaagccaagccatgccaaaatacgagatcaaacttgaagagggttgacaaggcaaagatgaacgtcttcagggaaagcacctagacacaccctatcggaccggtaacctcgccgtttcatgcctccaggccatgttgcatatatcgaatgtcatacctccactgtagagagcgactaatcgatgcgattccctcactgcaagaacaaccaaattgaagcggttgcgaacaagacgacatccagcttgggccgtaaactgttactatagctagtgagaaagggcgagccttgactcatatacgccgtacccgttatcgagaccggccccgaaagataaggatatccggatgaggaaatactagacggaacgccaccgaatggtatggtattgctcaccgtcccgaaagctccaggagccactccagctgggctggatgatggcagggctgtcggcgacgggggcgggacccaaacttgggacgacatcgatgccgtggtctgtgtccacgcggggccaacgtttgagggagtcacagcacaggtcgaacaaggtaccgcggaagttacgggtatagaaatgccttgtgacaccgggacaaccggatcggtccacgtgctttcgggtccatcgatcgtgctgatcatcgtctgcacgggcgctgtactagtccaaaagctggtagcggtcctttccttggtaaaagtcagaacttcgttggtggcatacgtcgatgcgacgatggagggagctggcgtgatcagccacactgtcacggtctgggcgcctttgaccgagactgtctgtgtttgaatcgccttggaccaaatggtcaacgttgaagtttgcgaatcaatcactgtagtcgttgtcgtgcaaggaaccagtacggtcgacctgaaaagccaaccagtatgagaacagaccggtctcgtggcatgggactctactcacatcatggttgtcgtcacggcgatgggcacttcgggccctgcagtgatatcggcacacgactcgttcggctgacatcgccgcatcaaggaactcgtggactccgaagcagttgctaccaaagtcacgaccgacgttggaatcggtacatggccgaattttgatgcggagatgtttgcgatgagcacaccgtacagacagatggttgccgatatcaggtcagatcgccacatgttacggacgataggcggacgtgtagggaaaaaggggacaaggataaggttgggcgtttcgtcggtcaaatccctcaggattatgaaggccatggtatgcaagactggcatgtcctatatgaatggttggctggctggctggctggaactcgcaccgccatgttcgccccttgactgcgtttcaacgtgtgtcaaaggacgcgctcggggtcggaagtgtttcgaaggatttcgctgatcacgacaatgccgtagtcggcgcgcgctattacgtacctcgtgtcacgtgaatcttagcggtaggttcccgcttcgtgtcaaagactgtttcgcttagccagcgaaaactctgctttctcacgcgttacccatcccacgaaacgattgcgaatcggctccgaagtcgagatggctgaccatccgggaccgatcgatctcaatttccattcaacaagacctcctgcgtctctctgacctctaatcatccggtcgacgacgaaccgcaagagcacaacacagtcatgccgtctgatgctgccactggcgtcatctacatagccccttcgccgcacaaacagccgcccacgtcgacgtcggttcgatcgcaaggcaaagacgcacctaccagcaagcccaattcgctcgtgccgcatccatcgattataagatccttgctgctgcttctaccgatcttgacaatatggccatggtggtgcaagaacctacattatgaacttcccgccccagtgttaaacgggtgagtgatgcctgcgtatgccagcagtttctacccgggtgactgaacctggtccgactacctcgctctcccatgcttagctctcccgaacacggacttcctgtcatctccgagatcaacatcatcagtcatgtacaacgtctagaagatatcggctatcgtgtcatcggcacggaagaagccgtggagggggagcaatacgtgtacgatgtcatgcaaaaccttttggcacagtgcacccgatcgcacgtcttggaatgcagtctttggatgcaggagggtgacggaatgcatcagtgagtcgacgaagccttgactatttgggtctgattactacgcgagcggtccactagaccctgagcaagtcttcagccccccacccctgtcgtcgctgacccccccagcttctttgcaggttcgacatcatgtctcatgccgtgcttaagtcctaccgtggcattcgcaacgtcatcttccgcgtatctggagtgaatactaccacctcgctcgagggcgaatctttgaagaaccacgtcctgctgaactcgcatatcgactcggctcttccgtcgaaagggtcagcagagtaagtcgccggccaggcggacagctggccatgccaagttgatggactaaccttcaggcgcttgttcgttgatgtagtgacggtctcggagttggagtgatggccgagcttgcgagagtcttggtcgaacgcgatcagcatattatcgggggggtcatcttcctcttcaatggagctgaaggtatgtcatgaaatgagcggtcagtcattcggaaacatcattgagatcgaaacttcgctaacatccgtagaaagcttgcaagacgccagtcatctgtattcgactcagcacgaaacacggcacgagtgcgtattggtcgatcattatggacgcggtctactcatctatacgctcatatttcatcggtgtgatcctcttacagtgtcaaggccgtcattaatcttgaaggtaagattgcacaaacaagtcaccctctgtcttgaagctcatttatcgtaccctgttgttgagcggctgggactacgggcggagcctttcttttccaggcaaccgctcaggagatggtcaatgcgtatgcgcacgtcccaaggcctcatgggaatgtgatcgctctcgaagtctttcaatcggggatcatcatgtcggagtgagtacgatggggttgtgctggttcatcctccatatgctgagcgttgaaatgcataatccatgccagtacggactttcgacaatttgaacaatacctcgctgtccctggactcgatgtaggtggagtcacgaagcaattagtgcttttcgccccggctgacaaatcttcctttttatgtcccgtgctcacagttcagcctggttggcaatagctactagtgagttgaatccatcattgcaattctccttcgaggattgtctgaacatactctatcgtagctatcacactcggcgtgataccgtggagaacatcgaggtcggagcggctcaagtgagttacaagagagctttcctgcccgtcattaagatagcgcgcaatgctgagagagtccggcacacccgtatgtcactggtttagcactttggagacacaatcttggcgatactcgatcatctcttgaaacctggctccccattgaacaccgatacgccatggtcgccgctcaactcggtcttctactcactgtacgaccgtgtctacgtgcagtattcgatgcggacagcagatttactctgcgggactttggtggcaacgtttgtcgcccttttcgtcgctcgaacgagaaaatatcaacggacaatctattacaaggcgatgctcggaccgctcgcggattttgtggttggactcctcgcggcagtcgcgactgctgtattgctacgttacatactcaagaagggtcaaagctggttcacacatgagcagctaccgctggtaatatttggtctcccggcattatcaggtgagcgacgagagaccggtagagacagtcttgtgttccgaatctgaccatgtctatgcatagctatcgccttgcgacatcacgtcatgtcgtctcgagtggattcaagcggcacagaaacccgcgtcgtggaacacgcgttcgcgtacgcttcagtagctcatgcactcgcctgcgcgaccgcgtcacagtgtctgcgcatcaagtcaggctacctatttgcgaacatgggcctactcggtctcttcgttctggtcattaacgagatacgcaatgtgtcaacggccaaatttgctcaggttcatttcgtccccacgtatatgatctggactgccgcgagcatcatgcttggtacggaggcgatcaccgccgtcagtagatgtgctctggtgactgccttggaacggtgcactgatctcgcatgatcccgcagtttttggacattttcgtacctcttgtgggcaggtgagcatcttttcttcacagactgttgtcttccagctctaagtattccttgtccctcttcacggccgagtagaatgggaagggtacgtgcgaaggcatttcgcccgtttctgcatctgtgctgaaccttctcgctgttttcgaaaggatgcaccgggcgagatcattgtcgccgtgatctcaactttccttatacacaacttcctacctgtcgcagcgcccttctttcatcggttcaccagaagtcaacaacgacagatcgtggtgagcttgcttatcgttagcaacgtcgccattgcggtattcgcgtctccgggttggtcatcctacgattccacgcaccccaagcgtacaggcgtccagtggttgtacaacgcaacgtccaccgaaacaagtttgcacgtcgctcaattggattctggacccggctatgccgactttgtcaagaagattcatgatcgatatgggtttccagaacacccccctgtcaaaggcggaccggcacaatgggacatcctttacccggtttcagcattcatcgagtccgaaaacttcccgatcgtggcgaacgggtccgtctctcaggagaagctgccagatttgaccatcaagctggtgtcagatcggtttgacgaacgatcaggatatcggactatgacgatcgaggtatcgcatgtgagtaaatcgtgtaattctcgagaaaagtatcatggcttacaatagcacttccatacaggaaggcatattgacccctgtgttatccttctccgcagaagtcatcgcatggtctttcaggatcgcgccgcccgtcggacatcttagacactatgtcaaagctaatgcttcaccgggatccgcaacttttcaaatgatcatgacattcaagccgttcacggatgaccaccggcttgctttcagctacatgggcatcggtaagcagtctgtgcacttccctcttcatcgtagctgcgagctgaaccaatatttatgtgcaaagacaaacgacaactatatcctggaacatcggaaaggtaccctggactcgctgcaaacgatatgttccaagacatggatgaatggatcgaagctgaatggaacggttcgatggaagtcttgatgtatggtgccgtgtgcggcatcgtcgaaatctagaggatgtacatcgataagccaggtagatgaacttatcctttcgtcctgtaatcgatctttttttgactgtctcacatgtggtttgcggacgggatgttgtacacgttgagaacatcgctaggaacgcgcggatgggcaaattcgctcacgtcaatgaaatgtccttgatatcgcgatcgaccgcgctaatgctttccccaaccgcaatgccatcatcgcttctttccgcccagtggatagtttgagcattgttttgaagttgcacgtcgaggtcgtcggcagtggagacggagacaatcgggtccaggccagcggtaggaccgccgccccctgcaagccacatcgcccagcgccaccgctcggtgctgctcttccagtcccatataacgcctacagtctcgcgaaactgcttaccggcacatgcagcaaagtctgaatgctcggggtacaatgcgggatgggcaggattatattctgggttgtccacccaggcgatcgtatgcgaggccctcagcaagaagtgcgagtgtctgagcaggagccagcgaccggtcgatgtcgcttgaccgttcacctttggggtggcagactgatcagtctgatggaatctcattgtcgactcggcgaggatcgacttgcctgcgtgttgcattccactcccaccgtagataatgtatattcaatctcgcccatggagtagtgcatattcccactgtctgacctggaaagatcaaacctttcccaaaagtcagatgtccgcacctgtttagtgagtcaggttagtcgacggagttatcgccagctggagactcgtccgacctacctcgcaattcttcgccatgatcaaggcttcgtatagcctagctagcaagtccgttgcgaagtcgggcagtctctccttccaatgatgtccctgtcgcgctttctgaccggtctgtctcgcgaggcgttgccacccagtccctgcaggttgagttacaacacgcattttcaaatccttgcgtctcttgaactctcgactgctagtgttccacatcgattttttcccgaatgtgccatgagaatctgcggcacaaggcgacgacggtgtactcgtaaagcgtgtttgaggcgcacaccctgccgctgctgcgccatttggactcatgctgccaagttccttgctcatcgtacaggcgacgtccatctgctgatcatttcgcaagtactgcgggtattgagtcgtcacgctcatcattgtggaaaacaggcgcatcggtacttagacgttgtacacgcaggatactctttcgcactggcgccggtagaaggtcggtcaagatcttggatgaagaaagacccatcttcacatcgaaaccaaaagcttggttcaacctcagcacctatgtacggaaaggatccacctgttgaatgacagttccctttcttcagcggagccaacagcgggaacggtgattcgatttcgagcgaaaggctgcagtatcgaggggcaaacacgagcaggtagggaactagcaggcgatgacccacgcgatcagggggacgttgtcaaaggaggggtttgcattcaccctgttttccatccccttggacggtcacatttgcatctggagacgagttcaaaggaggcgctggcgtgtcgaggccaatcgctgcgaggcaacgagtgccgaagcttcccagcaaggtcctgaagaaaaggtgacaagcggatcgaattgtccacaggaccagtggaaatacaaggcgaaatcagcagtgtgagccgtgggctaaactcattatatatatcgtcgtgggcttcatgaatcagtcaacaggccatctacaatcgtgtatacagtagcgtgatcgtcacaagtgagaagatagtccggaacgaaagagggcacccgccaagtcataacggcaagtgcaaccaagagtaagagggaaattgtgtgatcagactcgcttgccgagtgccagatcagcggagttgtcgtagccggccgggtgcaggaaaggttcttgagcgttcgatccgtgactcaaagggctgcgagaatgtccagaatcgttgttgagcgtcgccatggaagacctcccgccgtccgtcaagccgttactggcgaccggagcgattgggggaccactggccagcaattgaccgagcatagtctcgatgcgatccaaccgctcagcgtagtattggtctccgttgtggttcgtgtcgaatgcctgtacagccttaaaagcgtctcaatcatcacgtcctttcgcgataaacaagtggatacagcataagatccgtcccataaatggctcacgttggcaggcgctccgtgcgtcaaaaggtctccgagaccagctccctgaatcgccatagtgggtcccttggcagtagcatcgtcctcgtacattttgccggcggcgacattagggccggtcattgcaggcgctccaccactcaacatagttccttgaggtccaggcgctggcgcatcaccgtcctcgggtccgagaacagtctcgtactctaggtacttgatgaatttgtagaacccggccgcaacagcggctccgagggcaggaccgagccagtagctataagcactgtgaatcaggatggccgctgcggaattggcacatctcgaccgagtcccgactcacatccaatgataactgttgaaggttttcagaacgacactaggtccgaacgatcgggcggggttgagcgaaccaccggtgtagtaaacactcataagttcggcgatgaacaaggcgagacctattccgacaggtgcgaggtaagtcgccttgtgtttctcagcagccagtagtaaactaaatgtggagtggctgaagtgagcatgcgggcaccgacacaggtagatgatgagcatgctacgcacatggtgatcatcaacatggccgtcatgaacatctcgataaacaggcctcgagcaacgctgactccgggagccaacgaagtcctaacgttgagggttccaggcgtaagggcgtcaatgagagcagcgcctgtgataatggtgttagcaacatgacaaatattgatgggtcgggaagcgtctggacgcgagagtgcttaccggtaatgcctccgagaatctgagacaccgtgagcaaagctcctcgtaagggtgtcaaagcaccgaccagaaccatcccaagtgacacagcgggattgaacaaaccgcccgacacactgtacacaacggggagacgatgccacggagaagatcaatgagactggggccgtcgggcgcgagtcgagagagacaaatgaggcttaccggaagaagatccaagcgttgacggccaaagaaaacccgaaacacaaggaaatgtacagcaaggaagaagtcttaaggtgatgtttcgggtcaggacgccacacttgcaaggggtgatcgaacccaaccgagcctcacgttgacagcagcggccgcggtaccgtcttgaccttcagtggtgatctgggtgaccgagttgtctgggatattggcgacgtttgtacctccaagggctagcaacaggaacaaggtggttccgacgtattctcccaccatagcgacaaagtctgatcgaggttgttacgtattagaagtcgatcaggaatgtcacgttgtaggcgacaatcggaactcacgatttttgatggccaggccggcgggaccttgcgtgggcctccggatattccagtttaacccgttggcattgggatcaatcccgtcgagcctacccttctcctgggcgtgggtgggaagtgccgatctgtggaaacggccaggcatatcgagtggaattgatgtcgattagctaggaagtatcgtcctatgcgaattagtgaaacagttgttggtgatgagagatcgtcagggggcgcgacccccaatcaatgccctgtatatagtcggtcacgtttgggccgttctatcgaggtttccgttcgtgatgtcatcgatcctccttcccgtggctccacgaagaacaaggtaactctcggaaacttatgacgcctcgcttcgtctgagccgcagcatgagagcgcagcatgagaggcacgagttccagcacgaagtgacatcggcctcggtctagtcgcgtgtcgatttccccgcgtgagattcattcgaagcccgttcgacctgttcacggcagagcttcgatcggggcagatctgctggggatcagatcgggcgtgacgatgacgtggtggcgttttacgtcccgccgtcgatgccgcgtcagtttagctcacgtgacaagtatcgactgactgccggcttgttcttgttacgagcctgacatcaatccgtctcacctcgcttttatatgtcagcgtgcccagcaagttcgactccgaaaatactccgattggatactacgagaatagaggccgctggcagacagacgagattccgttgtaaagctcattcatcgcacccttcatctcctacagtcggttggatagcaattatgtcgactacgcctgcattcctctcttcacctcggaatcgacactacaaatctcagctatatctttacctcgatgatcgccggcatcgctcacattaacctcacggtacccgaaggtagcctgcaccttgccgacgaattctatggcgatacgctcggcttgcgaaaggttcctgttccaaaggctcaggagaattccctcgcatggtacgagaactatattctgccatatggttgctgacctcactgatattcaactgcatctggctggctgtcggctgatcgaatcaggttcgacatcggtgcgagcggccagcagatacacgtatcccatccgaataacgcttcagagctcctctctaccacatcgcgccagcactcctgcttcagactcgaaagtatggaagatctgatcagactgcaggaaaggatctacaagcactatgaaagaggcggagcttcagcacctgtatcagctgacaaggtgggagcagagaacagcggtgggtttgcgcagggagaaaccagtcatcctttggatttaagtcgaagctaacgactgtctactatctttggctccaggtgcaaagggcgatgaatacccaagtagatttttcgcccgggactacgcaaacaataggctggaattcagtctttgagccaggatggaatcaagatgtcgtgccttgcatacgggtcactatacttcggagcatgtggaagctatcgcctatgtgtactagacgtatacgccatccgcgagtgtatggataaggcggtatgacgtgatgaacaaacttcacaagatcacgcgagttcttcctttgttagaggtgaaacgacggggctacgcaacatgcaacgtgacaagtacatatatcgacattcaacggaacgacgttgagcagcagcgactcttctcccgccttccggagtccgtacaactatttccctatatcttgctccacatgtcgcctctcaccatgattcaagaccctccccacccccttcagcagctagccgatactcgggttgttcatcgccctgtgcaagccaagctacccccaccatggcattcaaactaccgtcggctgtggaccgaatcgatcgacggtgcacgtgacaaattggaacgtttgacgcgaatagctcgtagcgtcaccatcaatggcaatggcaagatcgaaaatacacccgaagccctgcagacaggatcgaccgacgagtgcatcaagttgtacctggagatcgatcaggtttggcggcagatcagaaattctgctgatgtattgcatcgcttagaagtcgaaccaacgctcctgcgcgaggcgtctctcgcacggcgagagagcatcaggcttcgtaacgatatgattcgctctagcacaatcagcaatttctacaggaggtccttcgcacagttcaaaaatgatcagctcggtgcacagacacaagtctatcaagaatttgatcgtgctttctcgagaaacgtcgaggtagaattcccgaagaacgaaaacgctctgcttaaggccagtgaaaaagacttgctagtgcagttttatcgagatctcgcggatatcgcttggccagtggtcgatatgcaccaagtagagacgagaggcctggcacccaaaatgatcaacaaattttggaaacaagagaaagcagcatacgaaatcaagctcaaacctggcaacgtcgagcatttcctggctgacgcagccaacgctaggactagggaattggtttacaaggaacaccatcctccgcttctcgctgtgggatacaaatacgctcgcaaatggctacaactggagcgggacctgaggggaaacgaaggactgcgttccagtctcactgcgaatcttggggtcggatcgaccgacgaactcttggacttgttcaatcacattaaccaacagactcttccgagtctgctcgcggagacgtcccgtatcagagcggttattgggaaggacgctcccgctgtgatcggcaatgatgtacagttccagccgtgggacagtcaatggatgacaaaacgttacgagctcgaggccaactcaaagatgttcgtttcggcagctggcatcaggtgttgtgaatggtccttggttttgcccgctcttctagacgtggtcgggggacttttcggctgtcgtattgagagagatcaaccgagtccgagttcacaagcacccgaattcttggaaatctggcgggtctatgacagtctagagcccagcgaggacggcctggaattcggtcgactgttcatcgattttacaaccaagcgacgatccgaaagctcccgtcagcaggccagccggtttatgccggtgatggcgccggcgcctttaggaagcgcaaaggtgcctcagatgctttggactatttctcgagaggtgtcccgcttctcgatcaccggcgttcgggcattagcgatggatttgggaaggcttcttgaagcgttattctgcatgaaacacgaccctgcatatctcccactcacttctcgcgaccgttgtgctcaaccgagcctttccgcctgcatcatgggcgacctatctttcgatggcaaactggttgaccggatgttggctccagcggcaagaacacaggacatgggcaagaggatgagaatctctgtcatgctgactagagtgcacgagatcagagcattcttcgcggaaactcatggtttagtaagcgaacatcgcgtgcccaattccagacaaccagccaggctgatctcacggttactaggtcgcgatggcacacgcgtttgatacagatccgaccatcgagcagacgatgttgattgctgctcattcgcaagctgtcgaaagctgggggcgccatgttccattgttgagccgccttcctcaagagatccttcgagatcgtcaagtgtggccgggaatcttgcgccgcagttgcgtcaacatcgccaaccagatgtcttcggctcagatcctggctcgactgcttccgaacggggtagacggcggttatgatcgagatggggtgcgagcgtttcgctcttacatcgcatcggagtcagagacgggtctcaaagggcttcagaatactatcgtgcaggccagaggaggaccgcttagggctcatgcgtatgcccagcgactcgcgagggatctcgacttgtttgaaggcgagcaagacgagagagccagggtacttaggcctatcgtgttcagactgattcaacggcgaagaagactttctccctgcgctcattcccctcagccgcagacccagccgcacttgcagtcgcagtcgtagtgatgaggctttaggatcgaacccatgtcggttattgcaagcgatcgtgttgtaatcttgtaccatcagtcgatgtgaacatgaccagcttcgagccacactcgtgccggggcgcggacgctctgatcggaagctgtcatgacccgctcgcgcacgcgtaagggactggcagccaccgacgtcatagaacacgacggagcgccttcgcaaccccgcgcgaaaccccttacgtgatcatggctggctttgaggctttcttttgttctcgcgaaaggccgaacgaagagcaaccaatcaccccgtgtactttgaggaacaaaaagcatcgagctagagtgtttcatgatacatgacatcagacaaacggttttcaccgcatgcaggagcaggctgatgagtctccatatatagtcgcacagataggccgctatcagtccgtcacctttccgccggggagatcatttgaaccgttcctcatcttgggcatcgactcgttgaaacgtcgcattcgtccggagcgaccgatagatttctacattaggagacttcccactaagatatcaggagttacatcttcaaagtcctttgcaccttctagccactccaagagctctactggcttattcatcgggttgaaggtgttgcgagcgctcatatcctttcgatgttcttgacatttgctagtcaggtctacggttgctcggagtaagcgaccccgttgccttaatcgtatctacccatggccgattcgccctcatcgtatgtatcaaagggatgacaatggtactcgtcacttggttgcggcaaaggacgatgtcgagtgcgattacttagagttctctcgtaagccgcccggttcccgaagttccggccttgcatgccaagtctcattctcatcctttctgcacttcaggtgtaccggaccaagttggaggtttgttttggtcattgctgggcagaatcttcatccgtatgatacaagcctctgattcatcgtacgattacttactgatgcttccatgtgcctcggatgctttgcttcgcagtcgatacgttgacaatatcgctcccctccgagtctcatgttccgaccaagcgactccagcgattttatttcactaacctgccgggcttatctccgctccaaggggtgagagtctcgggatcgatccaatgctggattgcggccattatacttggtaaatacggagaacctctcgaacagtttgcaggctggtttgggttcgttgtcgggtgtttgaacgcattgttggtgagtcgaagtggatctctgggattcgacttatctccaaagttgccttcgtcatggatcagttgacaggacattcttgggggggccttgttgaaggaaggacgaaggattttcttttggggggatgtcgcacgggtgtaagtggaagccaattccaagagacaggatcggtcaatatgggtcgagagtttattcttctcgcttaccgcgtcgtcttcaggactccacagaccaaagcggcacacatggtgtatcgaacctatagcgacagatacgaagggtgcaatcccgtaataaacgctgtaagcgactatatctcagacaaatacatcgcccgggaagataaagctgatgacccttcgcctacgactaaatcggcccgaggtaaggaagatcttgtatcaccagctgggatgtcgcgagccaccttcgagaggaccagttgaacggaacccgaccttcagttcgactcacgatcacaacacatggtcgtacctggtctcaagtatggaggctttggcttcgcgaaacgagaaaagtctgcatctgccggactatttattagcaaaccagtcgcttctctcgcaagtaagtccgcccggaaaaactccctagctaacgatacttattcatcctgcccggacacagaatacgcatctgtcgagacgttggaacggcccaaattgaatgtatagatctaagcctttaccaatagcggctcatacatgcacaccagcatcgcatatattcggatgtttcgacattttcgtcagaagatcgattgacacacgtcgagttctgctcaaaatagcatccctttcacctgctcgatctcgctaaccttgatgttacggatgatagcaacacagatgatggctaaacccatcaccgcagttccggcaatcagcatcttgctctgtgcttcggcataagccacctgtatggcgtatcgagttgggtctcctacttcgtagctgagttgtacagcaagatcttcgtaaatcgattcccagtcccccacggtctcggccggcagaagtcgctgcagagcatcgggaaagatatgcgtccagatcgcgcctgaaatagaattgccgacagctccgccgacatttccaaatagaccgagcagcgcgagcatggcagctgcatcgttgtgcgaggctacagaaagtacggcaacttgctggcagataatcatggtgccgccggcaaaggcgatgaagatctggcacataaccacgtagccgatgttcatcccgggctggcggaaatgtatcattaggccaactcctagaagataaaggggtacggcgatccaaaggagccatcggaaatatccggtccggcggatcaggtagccgactccaagtagccagaccccggatacgacgtcgaatgtgctgccgatgtatcctgaagtcgagatagagagattgaacaccacttgaaggtacgattgaaagtaggatgcccagcagtagtaagcgatctgataagtcaggtcggagaggcaggccccaaggacagtccgatcgactagcaagacgtaggggatgaacggttttggcgagaggtaacgctcgaccagtccgaatgcgaccaagagaacgaatcctatgacgagcatggagacaatagaagccgagcgccattgatccgaggtggaggcagccaaagagaacggtaacagaaagagtacaagtcccgctgccagtagaaagacggccaacactgtcgattggacgtgataggtcagtgcttggcccagtcagcatagcgcctgtcattcgcttggagcgaagtaataagacctacgatcgaattccacgacgtaaaaccagagcgcttgccgtaacgttctgccgctcttttgcttgaccagaagcccctgctttgtagctttgaccttgttgtactgtagcactccaaatagcggggcggcgacgaaaggcaggataatggcaaaagaaccataaccccagcgccaattggtatcatagaagccttccgctgacttgggccctgcgaatgcagtgatgatatacgggctagatgtgaaagcataggctagccctcgatcacgcaaggaggaggtatccgttgtaatgatatcgatcgataagatgagacttgtgaagccgactgaagtaaatacctgggtgaccatggtcagcttgacccgagagaacaaaaatccacctcactcacttcagccgcacaataggtagcgatgtttgtacaagtcgcgctcaagacgaggccgacaatacccaagagtgtcatgatagcaaatccgtaggaccgatcgaagagattgagtactttggcgaccaatatatacgatgccgccgacatgacgtttcccacgatggcaatgacggggatcaaagaatgagcttcaaatccgctgacgacatacgcgccgagattcgaagtgattgcggaccgaaaggcgttgacgaagtagagcaggaacatgctgtcacgatgtttgcatgtgaccatggtatcagtcccaaggcagatgaatgataccgaacccagtagcagcgacccacaagatgtaaacaatggtcaatgatcgctttgaccagacagccgttatcgcttccatctgcaatactccattttggggttcatcgtcgttccggtaatcgagcttgtcggccgtgggataaggatcagtctgatggtgtgccacaacatgtagtccgatcttgttgtcttcgtccactgatttgttgtcattctcgtctggcccagcgttggcgggaatgtggaaagggtcttctgtcatcatactagagactgacgccaaagtgtcttgaggatagaagctggtacgagtgtacccattgtgagctaccgagtatggtcaaggggcttgcggtatatatatacggttggacgcttcgcagcctgacgttgttatcagatactgctcggggtgcacgccgcccgttctattttcggggtggttcgccgggctcgagtcgaaacccaatatccgcgacgccccgaagacggttcgacggcgcggcctacgcgtagcggccggttgtcgtggccgaggtgaactgttatcgcttcgactgtgccgcggcctgcggcgtcgagtgcaactggttcatgccaagctcaagaacgtgggcgccttgcccgcgactttcggaccgaatgacaatatgattcaacacgatcactttaacgccgcgatatctcctgtcagtcgggtccgtttagcaacgagacccagacgctcccggtcctgaaacctgcacgcataccgttctggtggatcctcttcggcgatctcggacagctgagtcacgcatcgcgcgatcaaagtgatctttacagtttgtcttggtgtgaaccgagttggacgttgttgccacggaagcaggttgagtatatgtcttgaacgcacgctaggttacagtggcccacacgtcactttagggtagacaaattgcagctgaacgacctcatcatcatgcccgccttgcgaatcgcctcagatactcgtagtcttccagagatttctctatgcagatctcaactttcttgacgttttcgtccttgacaggctcgacgttgcgatgagtgacttgaccgactcctttggattgttcagccgacgtatgaaatcctggccatttggcactagaaatgatgcgaataacggcttgagctatttgtgtacacttaatgggtcccagcgagtgtgatcaaataagactcacaagtgtgcgcgcgttccttcgttccacgtcaacatgctcttgtcaaagtcgatcccgcaatccttacaccacatctccattagagcttcggggtcctttaacaactcttcgctttcgatcaggagaggtgccggtctcccttcacgctgattcgattcacggacaaggtcgaacagcatgcgaagctctctgtacccagcttcttcggggtcgaaatagtcgaagccggtatcggatccaggatagcacagtctttcatacgacggcacggccttggaagggtggcgtatgaggaatgtatggtggatgttctcgtcagtcaggagttccgtaggtatgagcgagaggttatcgttaggagtccctgctggggccaatgaaggtactgaagtgattccggacgatctcgattgattgaatatgtactacgaatgcgattggggtcgtcaaggactagccaacgagaacggcagggttagacgcaagtggagcgtacctgcgccatatctttgctgaaggtgcggcttgggccctcagatggcacgtccaccatgtcatgccaaacctatccgtagcgattgtattggcgggtcgatgagctacaccaacagcggcgactactgatgtgccaccaacgcttaccttctcgaaagtggactctgcaaattgcgggtaatcgtccctgcagcgttcggaagtgtatcgatccgaaatcctttcaggtccgaagtagaaggcatcccctacacaattcagtccgaagaccgagtcaagcttctcatgcgcatggaagaggatggtagggacctacccatgggttcgtgcaatacccggaactcgtcctgtttgttcagcatacaacactcgaacatcgtcgaggttgaacgcggatgaacccagaggattaccgtccggggctttgccttgacggaagcggacatgttgtgaaggcgcgaaacgagtattcgatatggtatagcgtctggtcgaggtcacaaaagggccggccggagcgattgggccggtcgcttctctgccaaagcgatggaaacagctgtttgctcttataccatggctcggcgaatttttccacgggatccagtgttgcaagtttggacacgtgcgctagcgaaacaattagatgcaggtcgggacgcggggcaaagaatgtggcgacgtcatcgaagttctaccgggctcgcaccgcggacctaacgagtctcaggccttgtgaagtgacggcgtaccaatccgcggttttgtgaaccagcagcgaaccgcatttgaaccaattacgaatcgcgttcgaattgctcacgggctgtagccgcttgtcgaactgtcagcgaatcagcgcggggcggaagttggcgtatcacgtggacaagcgaaagagtcgcgcagggaaaacgaagtgatggattggcaagcgatgacatcatcggtgttgcaggatccgcggtgcgtcagagctccgtcacgcgcgatgacgtcgatatctctcaccttcactcgctctgtgctggcatcctcgctcacggccaatgcttgccccctatctacagcatgacactcgacctatctacatctgtcatttccctttcgaacgaagcaatatcgatgacaagcatagcacatcgattcattgcgcagactcagtcctctaaattctattcgcgattgctgagaagacctggctcatcaacatgtcgatgaacctgccggcagggcctcaaccgagtcaagccgatcctggcaagacccgtccgactgccgaccttttctcttcgagtccgccacctagagtaaacacattcggtactctggtcgtccttcccttcaacatctcccctacagcttattcgaaccctgacccaaacactggtagacagaaagcgggtgggcagggcagagcggaagccgaaggggaaatcaaggaaggcttccggaggttgatgtcagaattacaaaatgccggactcgaagtgactacaaggacgagtggggatggacataaagtctgggtcttcgtgggtgctaaggggcgaaggatggctgacttggctgccagggaaaggttcgttcgagggccacccgtgatgcgtcgcaaaacctgctgacatgatgctgtccgtgactgcattcccgccgtattatcccaattggtttcgttcatccacccttgccatctcaatgctaccctggctacctccacgttccgctcgtccacttctgaccgggtcgaattcggattcggattcgactctgcaggcgtgaagacttcctccattcggttaccacctcgacccgccccacgtctttcacttctactctacccgaggccgatcagatcaggttggtcgtagagttgatctcgaccaatactctgcaaggtgtgtagccgaggccagctcgagcctgagttcgaactcaaacgcgtcctccttccggtgttttcaggtggattgggcatcacgccgggcaagggtgcatggaggcgtgttgagggggttgtcggacttcataacgaacaggttattccttgcgacgactaatgctgcagggatcgcaatgagctgacgacgaacgagctgctttgatcggcgaacgtccgtgacttcccttcactcaggccaaccatgcttgggtgcaatcttggctcaccaaacgatggaccaccggtctctttgggctcggcaatgagaggaacgaagaggacgacaggacgagaattcttgacatcgtgagtcgttgcccatgagaacttcctcaccaggtttcgcatgctaattatcatgatcgcatcatttgctgacgcagtacggtccttctgtcgcgctgtactttgcattcgtgtccttctacgctcaagccctgggacctctaagcgtggttggaattgtgttctggctgggttcgaagggtatgtctgtcgtttggacctgtcgaaaacccatgatagaacgctgatcatcgttatcgctattataggcacctttggcaaacttgcgacgatgatcggactcgaaacatgggcttataccggtggcatggcggaagccgggtacgggtggtcctggagctggctatacgcggccatagtcggcatttggggtattgctgtgactgaaggctggagaatcaaggaacgcaaactctccgtccagttcggaacatttagggtgaccaaagtggaccgcttacgcgcagagtatctcagatcgcttccgggtacttatggaggagcggctccctcgatcactgccatcgatgccctcaacgccagccattcagtcaccggcgatcctacctttatcggcagagaggtcaagatcctaacgagtgtaccggtcattgccggtctcggactcgtcctcggagcattgttgactgccatcttcatcttcgaggcgtttctcagcaagctgtatgatggaccaggcaagtcggcgttggtgagtcgacacgagggagacccgcgtactcgagaacttcgctcatcgtctcggctctaccgtgcttcgtacttctgcagggtctcattccaacgctcatgtttgtcggcgtcgtgcccaatgttctggccatttaccactccatctcggcgcgattgaccgattgggaaaaccatccgaccaagtccagtcatacggccagtctcacggtcaaaaccttgttagtcctgtattctcaccaaaacacagcgctagagttttcctctgatacatgtcagcttgttgtcaacacagcgccatgaacgcaatcgtcgcctacctcggtcttttcctctcagcctttatctatgttccgttcggggaattgattatggcacactttagcaagactccgtataccaccaaggttccgcacatgcaaccggaacaaactggtctcggacctcggaccagcgtgggggcgcgtgccgtcgtcaagaccgaccgcctgtcggggcaactgtttgcttgtcagttctagcgaagtgtcagccgattctcaaggggcctcacactcgggtcttttttgacacagataccgtgaccaatcaagctatcaacgccttcaccgagctcggcatgccatacatcaaggaattcattgccaattatcgcgaacaaagggcagatgataaatcgggcaggacaagtggtaccgagacaaccactcttgatcaacgggacccccgcgagagaacgctgctgaagaaaatcgatcgagaattgggtctcatcgagtattcaaactttaccggcaagtggactctccacttgtaactcaagttgcgacaggatatacttatctttcgtgacaccctctcttagattacgccgagatggtaacccaattcggctacatcacggtctggtcggtggtatggcctctcgccccactgttcgctcttatcaacaactggttagagttgaggaccgacgcggccaagatctcgacgcatgttcggagaccgatcgccgagcgtgtcgagagtatcggaccttggttacagacgatggtgagcatgagcgatcagtactaagagatgagtgtcctctgaattacatcgctcgcacttcagtccttcattacctggctgtcttttgtcacgagttcgactctctgctatctgttccgtccaaacctagagctacccgccaccgagcagtcaatcaatcccaacttgaaccttaccaccagctactcgacgtatgggtcgggcttcttacacaccgccatcgagaacgccctccagaccaaagtcgaaggttcgggcgtcggcggctcagcttatttgccaagttggatggtgcaatcccccatgatcaggaatgctctccctatgttcatcccggcgttcctcgtcgccttgatcgcatcgcatgcatactttgtggtccgcctcggcgctcgtcaaatcgcggaaaagctcgtttgggaaccaagtcccgaagctaaagctctcgaaatgagcgaagaggctgtcaaacgcaacttcttgcaaggcaagttcgaggacggtcttcatgccattggagggactgtagactcgcaatgggacgatgagcaaaccaagttcgatccgacgttctggcgcggaatcggcgaggggacgagcgccatcgcttcggcgctcaaacatgagtgatgataccgcaccaacccaggttgcgacagatcaacggacgatagacagacagtagccacgacacacgcaatagtagctgaagtaatcagtagttatccggttttatatgttcctatggccagcagcgcaagtatacgatctatcgcccagtctcgctagcctcaacgcggtgcgggtcagttatgtttggatatcaccgtcgggctcttcgtaacgtcacgtactcaaggtaccacagtcgtagccagtggacaggtttcgagcaggcagagcaggcggaccacttaggggttagaactccctacgcctcctttgtaccccggagctgggtgggggggtcacttcccgaatcctttatcgcggcctcggatgcaggggtagcgttttgcggtcgtacacagtacagcaaacattctgcctgttccatgtctcaggggccaggagtagcgaaacatcgtttctggactactcacgacagtgaagagtataaagccagatccgtgggttctaaactgacatgaggcttgataggtcgtgttggatcaagtcaagcagacgcgaaagagcctggctccgactacaaagtagagatgttggcccaaagcttgcttttgttcatggtgccgagcactttgacgatgctcaattacgtccgggctgttccaggcgaccacaaaacttttgtggacttcttacaagaacgcagagcctggtggaatgccgaggatcaaaagcctacgatggaacgaatgttgggcacccgtgagatggggactttttggtgggcgcccgatgcaaccgggtttagcgagccgcgagcgatcaacaatcgtccggacacaaagaattggccaggggagtgtgcagttgctttttactatgacgacatgtcactccgtctcagacagctccaggagagcctggagcgacacgattcgggtgatgacacgttcgctcgaccgctggcaatcgcacctctctgcggaggtcctactcgcaaagattggaaggaacctattgaaggtgacaaatttcctgcgccacacgagggggcaggtagggtcgtgttcaacaattaccgcagttatacggacagagatgcctactttgtgctgcagtaagcgactcttggctgtgaacatcctcatctacacgtgctcacgaaggctgttcgataccataggaatgccaataatatcgagaaggactgcttagtgatggagaattttagaggatacatgatgcaatatgccatggctgatgatgtagctcagattaacagtacctggactccagagttagtcgggatggtaagatcgtgcgatgtcgtggcttgactttttccccctttcctcgtttgatcaggatcgacggagttccggccttcggtgttgaaatgtttcgggactggatgatacagttcaccaagtccagagagggggaattctgcatcccgaatcctagaaaattcggctgcggtacgtcatcgtgtaacgatcgagacattgcgtctaagaaacagaaagtcttgtaaactgacgcctgtcatcgaattctcacaggatcgaagcgctggtctgattggaactggctgagcactttctggggttatatggacgatggatcttggtcggataagtttgacaaagcgcccaaccttccgccttcaaagcgatcccgtatcgagggttggctctgatgtgcttgcggggctagtttctagcaaagataaagcctggacacattttgacaggtcagacgctcaagtagtcctttgtccatttccgtgtcgtattaaccatgtcatcgtagagagttagagatcaaacttaattttccgccgagcgattcaaaccttaagcccaggcctcagccgacacggggacgccgccctctcgcgcgcgtcacctatgcagagatggcgggctgacgcccggatcattacttaatggatcgcttccagcttccaggatcagcaggactgggcggtggcgaaggatctaaatttgtaattgtagtatacacaacgcgacatcaacaagttttcgatacaatgacgctttcccttgactatgccatccagcgtgtcatcaagatggacgattcgctacgagaatacattcttgccgcttatcgcgccctctttgggcatctgtgcgatgtagataagataccccaggacgtcaaggcttttgaaacctgctaccacgatccgtctggatgctttttggtgtgtcgcgaggacaacaagatccttggcatgatcggttatcttccattcgaccggcgatttcgtcgactggatgggaccgtgcgacccgagttgagttactctcaaaacaccgctgtcgaggtggtgagactattcgtcactccttcatttcggtctcggggcctcgcgaccgcattgatcgatgccctcgtgagcgaagcgaaaaatgccaacgtcgacgtcatgtatctgcatacgcacgactttctatccggcgcccgccaactttggatcaagtctggatggcgcctcgttgcccaggacgcggatgaaccctggaagtctattcacatggagcgggacttgaaagacgaacgtcgtaaacatgtccccgcttgaagacaccgtgagtcggcgctgccaatcaatcagattgacggaccaatactaaacgaaagtgacttctcgtcgtcgtagtcgcgattccgaggcgagggagcggaaggaattgttaacgactcgtcgagagggtcgtccgaaagacatcataagcctgggcacaaactgcaactcatgccggtcgtccgtctgtctggcaatgcgttgcgcgtgcatggaacgtgtgcgagacagaacttttgctcgatgtacggcgcatgttcgtcccatgttgcacaacagctcgaattgctaccgccgctttccccttactcattcgcgatacagcgacgactccgatatccgctcgcaaagaagtacattcgacgtagtgaggtagcttatcatcgaacggtccgagttcgaatgatgaacggtctccgtaaatccacgtcgcgtcctcgcatcgagttcgaatcttcatattgaacgatacgatggtgtcttcgaggttgaaccgatcttgacgcgcatgcagactaccaatgcgatgatcccgcatcgacttcgaagtgcgcagggcgcgtgacatcattaggatttagtgcggcaaaacgtgtcatccggttcgccaatacctacgccccgcttcgaagtcgcgtcgagcttgacgcacgcggcctgcggactcggcacggacattgaaatgttctttgactccgactaccaccggaagctgatccccgcgaaaaattccagtcaagtcgatcgaccaacaacgatacggacgttcgaaagcaattcatactcatcgttcgcgcctgctgctgttcgatcctactcatcactagaactctacacatttgcttcgaatcagcttcctgctagctctaggttggccgtccctcgacagatccgagcaggcaccaacggctcactcgtctcgacgtcggttgtcgcatcttcacgcggacagctcgcaccgtaactaggcccctgtgtcgagcgacatcgtagtcacacgaccgaccatcatccggttagttcttctgagcctcgggagaacctgaataagaagcgaaaggtgggggttgggtgtacgggggatcgtcttgcgactgcctctttgtcccggcccaagctgatcgaacgaactgtgttgatccctcagtcctcgtagctaatttgcccagctccacctgaacgatcgcctcaagtcactacgccgtccctgtctctttccttcaagataactatcgatttccccgcgcaaaagatgtcaacgcttgccccatctccatctgccgaacttcaggcagctagctcttccaccctcccttcctctgcagcgaaagcctcgtcttctccccagcctcccggagggactttccgaaagactcgtcgacgctcgaacaagtcacagtcgacctcggtcggtcataccggctcgcgggaagtttctcagctcgaagaggctaccaacccgaagaaggccattgagacctcgccaggcccaagaagtgtcattccgtcgaatcacgacggtgcacaggaaggcaaacaggagggccgtaagcatccgactgataccgctaccgcaacaacaacgacggctttcagcgagagggctgcagtgatcaaggccaaagccaaggcgcaaaagtcgatcaaagtaaaaaaggcgatcgaactggcgaacaaacagaagggatcagttaataagagcagcaaccacccgattgctaccggcaagcaaggcaaaaaatatgtcaagaaaagattggcggttcctagcgggaaaagttatatgggtcctggcgcttcgaagcagagcgagggacaacggacacggcccatcgcaaatggtgctattggtcaaatccaagccgcggaggtaccaagtgccgccgctgcgattcaaacagcggcccaaaacgcaacaacgtcgagttcgagcgataccccaacagcgtctatcgacgatgcgccgtcaacttcacccgccccaaccttgattcgggcatcaacacaaactacgaagacaccagggcgtagactgcgaccaggcaaggctgcccgacagcaagccaagctgcaagccgccagtcaatctggcgacacagctaacatccaagagcagactacatcggccgaaccatctgaaccggctacactcgacctattacttgtgaccgctggcgacgagtctccgacactgaatgtcgagcatgacgtcacgccagctgcttcggtatcggccacagccaacgttggaccgacccaagtcaccggcggcaccaaacgacgccgaggaaccgctcgcccactgattgctactggtaaaggatcaccccaatctgaatccactacttcaactcagaacggcttacccgcgaccggcccagtatctctgtcttctccatcgacacggtcgaaaaaggcgaagccgaacccagtcaaggctgtagcaggagcgaacgcaaatgtagcagctgagaacaagcttaaattcaccctcgactcggccccggggcccgaattcatcgcttcctcggagaccgcgacgactcggactagacacgatcttgagcgagaactccagcacaccgttttacaactcaagatggccgagctccaagtccaaaagctcaagctcgaagcagagctggctcaaagccgtatccctacgtaggcaggaccttccggcaaccgtgacattcacgtaagttgctaaatagacgggtggccagtcaactaaacgcgcagaaagcttacccgctgtgggaccttatcagagatcagttcgctcgggctacgccggttgacgtgttatttgttcgcctggagactcgggttgtaatcaggactgagcgatcacaaatgcagcaacacctataatagctcgcctcaatgcaacctataccttaaaccatcacataccactgttcgaaaaggcaaatccatcctctgtctgtcgattagcccctgactcaaccatactcttgaagcggaaacgaaggcgggttcgatccgctctcccgcgcgatcgatatcacgtgaccatctgttcgcttttccttcgccgcctcttgtgtctagttcgattgccacgtcgatggtatctatctatctatctagctatctatctaccctgagatctgtcaatccgaccatacagcacatcgaccgggttttagtgatcgtcattgctctcccagattatctttcattagtatttggtatctaccgaccggtcagaggattcgccgatcgacatgacagagacggccaagcaggaaagcaatgaagcttggggaaggggtgagtcgaccgtaagactcgctacgtcctccagtataaagctcgggctcgtgtgagactgtcgatagcagcaagacacttcgggcaatgccatcgatggaaatgctgatgcgatacgacgctgaccgcaatggtgctcgttttgcagtattgattgcaggaggcgtagactggtacgcctcagtgactgtgactcgatgactcgacacaacggttcgggattgacgcggcagtgaatccatggtcttaggctgaacttggggaagaaagatgtcaagccggagcccggaaggtgagtatcgataacttccggtcatcttgattacggcttgaccgtagtttgggtcttcgatgcagtgaaagcttgagctcgcctcatatattgcgagctcttgccaacgtcaagattgcaaagattttcagcggcccatccgcaatgcatgctgttgcagtcgatggtatgtacaggcggtagctacgggatggttgatgcaggccgccatcgctcccaagctgactgcgtattccaaatgttgcgccattactgcagttcatgggaacgctcacatgctcggtcgcaactatccctcctctgtactcggagccgcagcagacgcaattcctttctctccctaccccgcacccacgctaccatcatctgcgtctgtacctatcgccgtcaagattctcgcccgggaccttcctggagcccgcacgaccacatccatcgccggcaagacagctagcggttcgagcagtaaggacgcgggactggacgagcctacccgtatcgtacatgcggcatgcgcccgtcatcatacgctgctggtttctcaagacggaagtgtctgggcatgcggatcgaacccggacggacggcttggcgtggatgtcaagggcaagggtaaggatgaaaccgagtttgtgagggtgcgtggcccatgggagaaagacggcggcaagattgttcaggtgaggcggccatggtcggcccacggcgtgtaatcgaccgacgactgactctcgcctttgcgtgaccgccatgttctcaggtctcggccggactcaccttttcgctctttcttgtcgacaatggcaagatttacgccagcggttcgcatgagaatgggcaatgtggaaacggtgtaactggtggacgactctcggcgccgggcaagaccacgtacgactatgacgattatccagtcctgatccgccccttcaccaaaagcaagatcgtcgccgtcgtttccggaaaccagcacagccttgcgatggacgctgaagggcaagtgtatgcctggggattcgccggattcggacgtctcggcttgggagatcaagtcgacaaaaagataccgaccatgattccacaatacgctggcaacccgtcgactcgagcgagagacatcatttgcggtcccacctgctccatcattatcgacaagcagggactctaccgtatagctggcaagtggaaactcacgggtgacggttcgagcggaagcccatatacctacttcaagaccattcccgacatcgcctcatgcaacaccatcaaagctatcagtggcgggaacggtcactttcttacgatcccttcggagaatgacggcatcactagcgtcgccttcggacagaattgtatcggcgaacttggactgggcccgagcgagccgagaaactctgggaagccaatcgagatccaaacgctgcggggtatcgaggtcatggacttggctgcgagtaatgctacgatgtactggttggcaagaccgggcaaggcgcttgaagctctctctcggtggccagaagaggtcgattcgccagatgattgcttgatctgtggaaaggactcggacgatgaccttgtcgaatgtgaaaaatgcgagaagccatgtcacgttggatgcaacgacccacccctcgatggagtaccggatggagaatggctctgtccatcgtgcaatggacaacaggatgatccaaactacagacctttccgcttcgacacggccggggacaagattacgtcgaaacgcaaagccgatgccgagcccatctccagcaaaaagggtgagtccgtttcattgagcacgtgcgtacctcgccacacacggctcacaaggtcggtgtgggactcgtcttcagttgcagcaaagaagagaaagtgacggattgatgtgttcgatcgggataacagcaaatcatcgtgtacttgtacttttgtattttgcctcggggttaggggttagggggcctcgttcccccacgctggctgcccccccccactgcgctggatcggtcggcattttggggatctgccgtaatcgatccgaactttcccccctgctcacgccggatggaatgtccgtggggtgggtggatggttggatggacgttgagtccaatctctcccgaagccatacctcactcgctcaggtcaatatctttcaacaacgacatcattctcgaaccaaaacgtgtagacctcggtcctcgttccttcccccacaaacttagttctggattgataaggcgtgtacattgacgctgtcaagcctgactaaaccaacgaaaccgagtgacgaaacaagccactcttcatcagctcgtgaactcttttgaacgagcacgacagaaatagacgagaggcagcgagggatcgatagaatctccgagctctgacctcctccccactgtttcaaacgacccacaaaagtaatagacgtggaacgtagttgtgagtataaaaggatgagattgcccaccttaccgaagttgaccaacggctctttatgccctcgctcgcaggttgatcgcctttccggatcttcgatctaccttctcacacacgtcaggaccgttctggccccctgacaccggagagtcactcaacgaacctgaacaagttcaactagagagagaacgcttcatcatggcttctttcttctcttcctcctcttcccaaccctccacccgtcctctcgtgcttcagcacgctaccacccgtctttcgatccccatcccttcgtcctcggaagcatggatcgcggccgaggtcatccgtgaagagttttatcactcgatcgagggagacgccgatctcatcgagattgtcactcaggagtacgatgacgagggtaaccccgtccaggccgtggccaccaccgagccccaggtcaagctgatcagcaagtttttggcattcgtcaacgacaaggtggtcagctcgggtaaccgcagcaagacggacgccagtcagatcctgttgtcctcgtacgaggcgttcaacaggtctttcctcgccaaccaagccgtacactcgctcgtccagggttacgacgtcgacattcgcgccaaggtcctcgccgcctattacaaggcgttctccaccctccgagccgtctacggtgccagcgaggtcgagctggtccagaccagcgctctcttcaaggccgctgccgagggtcaagccgagctctacgctctgttcggtggtcaaggtatcaacgaagtgagtcgttaactaccgcatgtctttaatatcgattggttctgatgctgatcgctcgtggacacttttcctcacacctgcaggtttacttcgacgagctcttctcgttgtacgatatctacaagccctttgtcgagcccttcttggcatcggctaccaagtacctcgatgctctggccaccaagtctcaggctgccggacacgcctactacgctcacgggatcgacgtactctcgtggttgaacggatcggccagcagacctcctatcgagtacctggcttcgatccccctctcgatgcccttgatcggtctcacccaattggtgcagtacctgatcagctgcaaggtctctgacctcactcccggtgagatgaggagcaggtttaggggtgccactggacactcccaaggtatcgtcgccgccgtcgcggtcgccagttccgactcgttcgattcgttcgacgtcaacgccctcaaggcgctcaggcagctcttttacctcggtctccggggtcaagatttcttccccctccttgcgctcgagcccaagttggtcgaggacgccgaggagaatggcgagggagtacctaccaacatgatgatcgtcaacgggatgcgtctcacagacctcgagaaccaggtcaagaagaccaacaagcacctgcccgaaaactcgcagatctacgtctcgttgcacaacggaccgaggaactacgttgtcaccggtcctgccaaggccctctacggattcgggtgtgcccttcgaacggtcaaggctcccgccgggcttgaccagagcaaggtcccctttagcaagcgaaagatggtctttaccaacaggttcatgcccatcaacgtcccttaccacagcccttacttgcaaggcgcgacgcagaagttgatgcaagaggacttgcagggagaagagttgtggcaggccagcgagatcaagctcgggctgtaccacaccgagtctggtgagtcgatcctgcgatgttcgggaggtgtgcggtatggtttgctgaccctttacaccacgttgatctgaccttgatttcaggcgagaacctccagaactcgtcgacctcgatcaccgcctcgctgtgcgatcagatcttcaccgcgcctatccattggcaaaaggctaccgacttcccccagacggctacccacgccgttgactttggtcccggacgactcagcggagcgggatccatcaccgccagggctttggagggtcgaggtgtccgcgtcatcatcatcggtgacaagggcaagaacggtgccgagatttactcgaccggcgccgtcaagtacgaaaagaggtggtccgacaagtttacccccaagttggtcaagactaccgacggcaagctccacatcgacacgccattctcgaggttgctcggaaagcctcctatcatggtcgccggtatgacgccttgtaccgtgcccgccagcctggtctcggctactctcaacgccggataccacatcgagttggccggaggtgctcactacaaccccaaggcgctccgtgccaaggtcgccgagattcagagcctgatcgaacctggtgttggaatcaccctcaacgcgttgtacctaaaccagaggcaattcaccttccagtaccctctctggcaagagatgaggcgggagggtctgcctatcgaaggtttctgtgtagccgctggtatccctacctcggaaaaggctgccgagatcattggcaacctgaaatctgccgggatcaagcacatttccttcaagcccggttcggtcgaaggtatccgacaggtcgtcaacattgccgcggccaacccggactaccccatcatcctccagtggaccggtggacgtgccggaggtcatcacagctgtgaagacatgcaccagcccattctcgccacctacagctcgatcaggcaacacgccaacatctcgttggtagccggatccggatttggaggagccgacgacgtctggccttacctctccggagactggtcggtcaagatgttcaacactcagcccatgccttacgacggagccttgttcgccagtcgaattatggtcgccaaggaagcagagactagcccctctgtcaagcagctgatcgtggatgcccccggtgtcgatgacgacaagtgggagggtacctacgacaagcccaccggtggtatcctcaccgtccgatccgaattgggagagcccattcacaagatcgcgaaccgagccgtcaagctctggagggaattcgacgacaccgtcttcatgttgcccaaggagaagcgaggcgcctggttggccggcaagaaggcctacgtcattgataagctcaacaaggatttcaacaagccctggtttggcgaaaaggccgatggcactgtcgtcgacgaccttgccaagatgacgtacgaagagatcacgcgacgaatgatccgactcatgtacgtcgccaagcagagccgatggatcgatgtctccctccgaaacctcaccggcgactggctgcgccgagtcgaagagcgattcgccggggtcgagggcaccaagaccaaggagtcgcttattcagtcgttctccgacctcgaaaagcctttcgagactgtcgaggcctttttcaacgcctacccgcgagccaagactcagctcgttgcggccgaggacaaggcttatttcatgaacatctcgcagaggcccggacagaagcccgtccccttcattcctatcctcgacaacagcttcgagatctggttcaagaaggactcgctttgggccgccgaggacattgacgccgtctttgaccaagaccctcagcgtgtctgtatcttgcaaggaccgatcgccgtcaagtactctaccagggtcgacgagcctgtcaaggaaattttgggcaacgtcgagtccaaacttatcgagtatttgctcgagcgatattacgccggtaacgaagccgaagttcctgtcgtcgagtacataggagccgaggcgtcttctgctcccgccagcttgcccggcgtcaacgccgttgagaacgccgatgagcgcacctaccaggtcggttccgctcttccttcgctttccggatggctgcagaccttggctggacccgaacctagctggttgcgagctgccttgacgtgcgtcaacgtcatccaaggaacttcttatatcagcaaccccttcaagcgtttgtttgcgccccgaccgcagcaaaaggtcgtcatcgctcagtcgaacggcaagccctcttcggtcaccgtctacggtgccgcccgatcgtttggcgctcacccgacggacttcaaggctttggagatgaccttcgacgcgtccagcaagagcatcaagttgaccatgttcgaggagcgggccggttctagcttgcctttggtcttcaactttacctaccgccccgatcaaggtttcgctccgatccacgaagtcgtggacggacgtaaccgtgccatcaaggagttttactggaaactctggttcggagatgaccaggtcatgccttcgcttgatctcactgccaatctcacttgcggagagaccgtcattgacgtcgagactgtcgagcgtttctgtacggttgttggcaacgctggagagactttcaagcagcgacgaagcgagaaggtgcaggcccccatggactttgccatcgtcaccggctggcaggtgagctgctccaggttgtccttcgttggtcccacacgcgaaactgacctctctaacgtctatctatgcagtccatcatgaaggctatcttccccgacgctatcgatggcgatctgctcaagcttgttcacctttccaatggattccgtatggtcgatggagctacccctttgaccgtgggtgacaagtgcagcgccgaagcccgtgtggtttccgttgtcaacagtgacagcggcaagaccgtcaaggtcaaaggacatgttatgcgggacggcaagcccgtcgtcgaagtctcttccgcctttttgtaccgtggaaggttcaccgacttcgagaacaccttcgaaattgtcgacgaagccgactacgaggttctgctcgacactgacctcaaggtcggcgtcctcaaggccaaggattggttccaatgggacgacgactcggtccctctcgaacaaggcgcgaccttgaccttcaaggtcaaatcggaagtccactaccaggacaagacgacctaccgaaaggcttctgttcaaggagccgcttacatccgtgaccgaaccaaggccttggtgcaggtcgccaccatcgactacgagggtggtcgttccattggaaaccccgttgtcgagtatctgaagaggcagggccaacctaccggcctcgctgttcctcttgagactggcgggtacgccttgatcaccgacttggcctcgtccacgtacaccacccccaagacgaacgaaccgtactctaagatctcgggcgattacaacccgtaagtactccgctagaggcatcagtattgactcttcctgatgttgctgcctcatgacatttctagtatccacatcaacccgtacttctccgactttgcggtgttgcccggtactatcacccacgggatgtggtcaagtgctgctacacgaagctacgtagagaccgtcgccgctcagaaccaccccgagcgtgtcgtttcgtgagtcttgttcttgaaggacgatacgataagacttctagctgacgaggcccatacaggtacaacgtgggattcgttggcatggtcttacctggtgacgatctttcggtcaagctcactcacgttgccatgaacaacggccgtaaggtcatcaaggtcgagaccgtcaaccagcgtggtgaaaaggtcatcgaaggtcaggccgaagtcgaacagcctcctaccgcctacgtattcaccggacagggatcgcaagaagtcggcatgggaatggagctgtacgctaattccccgaccgcccgtgccgtctgggacgctgccgatgcccatctcgggactacctacggtttctccattgtcgacatcgtcaagaacaaccccaaggagttgaccattcactttggtggaatcaagggtcaggcgattcgtcagcgatacatggatctcacctacgacactgtcgacaaggacggccagcttaagactttgcctctcttcggagacattgatctctacacgaccagctacaccttttctcatcctcaaggtctgctgttcgctacgcagtatactcagatcgctcttgtggtcaccgagaaggctgccttcgacgacatgaaggccaagggtctggttaccaccgaagccgccttcgccggtcactccctcggagaatactctgctttggctgccattgcggatgtcttgcccatctccagcttggcagatgtcgtgttcttccgtggtatcaccatgcaacgcgctgtgcaacgagatgccgaaggaaagagtcaatacgccatgatggccgtcaacccctccagggtgtcgaagaccttcaacgagggcgctttgcgagagatcgtcgatgcagtcagcaaacaaaaggaatgcttggttcagatcgtcaacttgaacgttgccaaccagcaatacgtctgtgctggagagttgcgcggactgatgactttgaccaatgtgcttaacttgctcaaggtccaaaagatcgatctcgtcaaattggccgagatgatgacccttgaagaagtgcgcgagcaattgaaggagatcattgatggctgttgggaaaagacgatggagaaagaaaaggagactggatccatcgtccttgagcgaggattcgcgaccatcccgcttcccgggatcgacgttcctttccactctcgatacctgtggccgggtgtcttgtcgttccgtaactacctttccaagaagatagacgccagcactctcaaccccgatcgtctcattggcaagtacattcccaacttgatcgccgagccgttcgaagtcagccgcgaatatgcgcaaaagatctacgatcagacccagtcccctaggctgcaaaagatcttcaaggcttgggaagccgacaactgggactcggaggagaaccgccagcgtctcgcttacaacatcttggtcgagcttttggcttatcagttcgcttctcctgttcgatggatcgagactcaggatcgattgtttagcgagttcaagttcgagaggctcgtcgaggttggaccatctcccactctgactggaatggcttcccgaaccctcaaggcgaaatacgaggctcaagacgtctctgcgtccatccgcaggactatcttgtgtcacgccaagaacaccaaggaagtctactacctcttcgaggacgaagttgctgaagctccggccgctaccgacgcttcggctgctgtcgctacccccgctgcggccgctgctcctgtcactgttgctgcgccggtcgctgctcctgccggcgtcgccgctgccgaagtcccggacgcaccgctcaaggccgtcgattctcttaggatcatcatcgctcagaagctgaagaagagtgtcgcggacattcctctcagcaagaccatcaaggacctcgttggcgggaaatctactttgcagaacgaaattcttggagatttgcagaccgagttcgcctcggcccctgaaaagggtgaggaactgcctttggacgaacttggttccgccttgaacgtcggctactctggatctctcggcaagcacactagcggtttggtatctcgtatgattggaggaaagatgcctggtggcttcaacatctctaccgctcgaggccatatcaacaagacttggggacttggaccccttaggaccgatgctgctctcttgcacggtatcacgatggaacctcccaagcgattgggttcggaacctgaggccaaggcctggctcgactctgtcgtggctgcctatgcccaacaagccggcattacgctctcttcgggaggtggcggcggtggtggcggtgctgccagtggcggcgctgtgatcaacagcgaggagtttacgaagttccaggccgagcagaatgagttcacctcgcgtcagatcgatcttctcatgcgacacttgaagcgagatgtacgtgccggagagaggctctatgacgaggagaaggccaactcggctgccctgcaagaacgtttggacgctatctcgcgagagcacggtgacaagtacgtgaatggaatccagcccatctttgagccgctcaaggctcgtcacttcgattcctcgtggaactgggtgcgacaggacgccttgatcatgtggtatgacatcatcttcggccgtcttacggctgtcgaccgagacattaccagcaagagtatcgctatcatgaaccgagccgatcctactctgctcgagtgagtcttgcatcggtgttttttggttgcgctttcccggatgctaaactcgtgtctcaccgcagctacatgcaataccacattgaccattgtgacgaatccaagggagagacctaccgactggccaaagagtttgggcagcagctgctggacaactgtcgagaggcactccaggagaaccctttgtacaaggatggtgagtcgatcgcacggcccgataagcgcacaccttcactgattgagcgtccggtacagtcaccttccctactgctccttcgacgacaatctctgccaagggagatatcatctacgccgaagtcgtcagagagaatgtgcgcaagctcgaacaatacgtgcacggtaagtgatctcgttgatgccgcacccgatcccaactcacggccgatccaactatagaaatggctgccggaggcaagatcaccagtgtctcgaacatggacaaggttcaggccgacgttgccaagctttggcgtctcgtcagcagccaacctgctatctccaagagccaaaagtctgccatcaaatcgctctacggagaagtcctgcgatcccttggcaaatcggccgagcctcgcggaccaccgggtcccaggagccgacgctcgtcgtcgcagttcttgcgacccaacgttgctgaacctagcgtcgtgcaggaaagcaaactgcccttccttcacctcaagcgcaaggtcggctcaaactgggcttacagtcaaaagctgactaacatctacctagacgttctgaccgagatcgccacttccggtacttctttcgccaagaaggccgcactcatgactggtgtcggcaagggcagtatcggatgcgagatcgtcaagggtctcctggctggaggtgctacctgcgtcatcaccacttcgcgatacagcagggctgtcgtggactactacaagaccatcttccatcagttcggatccaggggttccaaactgattgttgtcccttacaacggtggctcaaagcaagataccgaggcactgatcgagtacatctattcgactttgggcttggacttggactacatcattcccttcgccgccttgcccgagaacggccgagagatcgacaacatcgacgatgtctccgagctcgcgcatcgactcatgttgaccaacttgctgcgactgctcggagctgtcaagacgaagaaggctagcaggaacatcgtgacccgacccactcaggtcattttgcccttgtcacccaaccatgggttgttcggaaacgatggtctttactcagagtccaagattgctctcgagaccctcttcaatcgatggtcttccgagagctggggcgaatacctctgtatcgccggagccgtcattggatggacccgaggtactggtctgatgagcgcgaccaacttcgttgccgagggcatcgagaagcttggtgtcaggactttctcggcaaaagagatggctttcaacattctaggtctgatgcatcctcttcttttcaacatcacccagattgagcctatctgggccgacttgaacggaggcatggacaggctgtcggacctggcagaagtcactacgaagatccgtaccgacatcaacgctcaagcgggtctccgaagagctatcactatggagaactcgcaggacttcaaggtcatcaacggtgtcgacgcagagcgtttgcatcagaagatcaagatcgctcctcgagccaacttccagttcgatttcccttcattgggcaagtcggacagcttgaagcagctctctcacttgcaaggcctgatcgacctggagaaggtcgtcgtcgtcaccggtttcgccgaagtcggaccttggggaagctcgcgtacccgatgggagatggaagccaagggagagtttaccatcgagggctgcattgaaatggcctggatgatgggcttcatcaagcacttcgatggtcgtctcaaggacggcaagacctgggttggatgggtagatgccaaatctggtgacccagtcgacgacaaggacatccaggccaagtacgagaaggagattctcgcccacactggtatcagaatcatcgagcccgatctcttctttggatacaaccctgagaagaaggtcttctaccaggaagtcgagctgactcacgatctggaggctcttgaaatctccaaggaagacgccgagcgattcaagcgggagcagggcgagaagtgcgacacttgggcccaatcttccggagaatggttcgtcaagttcaagcgaggcgcacgggtgatgatccccaaggcgatccgattcgaccgagtcgttgctggacaaatccctaccggatgggatgcacaccgatatggtattcccgaggacatcattgcccagaccgatcgaactgctctatgggcattgatctgcaccatggaagctttgatcatgtcgggagtatctgatccttacgagctctacaagcacatccacccttcggaagtcgggacgagtttgggaagtggtatgggtggtatgcgaagtctgagtgccatgttcaaggatcgtcgagaagaaaaggatgtccagaaggacattctccaggaaaccttcatcaacacggttgccggttgggtcaacttgcttttgctgtcgagcagcggaccagtcaagattcccgtcggagcatgtgctaccgctttgcagtcagttgagatcgcttgcgacaccattctgtccggaaaggcgaaggtcatgattgccggaggattcgacgacttcagcgaggagggttcgttcgagttcgccaacatgaaggccactgctaactccgagaccgagtttgctatgggtcgagaacccaatgagttctcgcgtcccatgactaccactcgatccggtttcatggaatctcagggttgtggtgttcacgtcctgatgaacgccaaaaccgccatcgagatgggagctacgattcaaggtatcgtcgcttatgtctcaacccacaccgacaaggctggaaggtctattccggctcccggtcgaggtgtcctcagcacggctcgagagcttgctaccaaggagcctctgcccctgttggacatcaagtaccgagctcgacagttggcgttccgacgcaagcagatctcgcagtggttcgaaaacgagcacgaagtcctccgcgaggaaattgattacaggaagcaaagcggcatcaagaccgacgactccttcatgcagacgcggttgtccttcatcgaggacgaagccaagaggcaggagcacgatgccatggcgacctttggaatgctggagggcaaggatccccgcgttgctcctctccgtcgcgcattggctgtttggggtctcaaggccgacgatatcggtgttgtcagttgccacggaacctcgaccaaggccaacgacaagaacgagagtggagtctacaaccttcagtttgagcagctcggccgaacccctggcaatgctgtcccggtcatttctcagaagtacctgaccggtcacccaaagggaggagccgcagcttggcaattcaacggcatgatgcaggtcttgcaaagcgcgctcattccgggcaatgccaacgcggacaacattgccgaagagctgcgtgctttcccccacctgttttacccctccaaacccattcagcacgtccaactcgaggtcggtcttatcaccagtttcggtttcggacaagttggtggccagatcgcagtcgtccaccctcgataccttttcgcggcgttgcgccctgaccagtacaatgcttacgtcgcggctcgcggcgagcggcagttggaggcatactcgcgtatgtcttcggccatgacccacaacaacctggtccagatcaaggagggacctccttacactcccgagctcgaggccaaggtattgctcaaccccctggctcgtgcctctgctagcaaggactcctacgccttcggtcccaagatgccccagggtcccgctctggctctcggaaacttgaatgtcatgggagatgtactgaaccaggcatccggcgttcacggagtcgggtgagtgacaggcaacttgagcgctagcctaacgacttcgctgacaacaatcccctttgcagagttgataccgagttgatctcgagtgttcccacctctgagacgttcaggcagcgaaactttactgaagctgaggtaagtttcgcctctcaaatttggcgagattgtttttcctgatcattcgctcgctccttcagattgcctattgcaacggagctcccgattccgatgcatcgtttgctggtcgttgggctgctaaagaggctgtggtgagtcatttatgctcgatgatagcggtgccgtgccatggcgctgaaaggatgtccccttcatagttcaaggctttgggcgttcccagtaaaggcgcgggtgcaagcatgaaggacatcgagatccagaacaccgaggccgggcccactgtaagcttcgactcgtgtgacttacatctagatcacccggttgacagtttcccacgtgacgctcaggtcaatttcactggcgacgctcaaaatgctgccgctggcaagacggtcaaggtttccatctcgcattccgactccactgtcgttgccttcgcggtcactcagtaatcgaccggtctcctgacggtaagcagacagtcacatctcaggtcctgtgacatatcgactgatcgttgtacttcacacagacttctgctttccttcctttcgtacatgacgaacaactttttgggctacggttcctcttttaatttgatgtagtattacgagtttacgctagacgagcctcacaaagggcctatatatcacgatgcgaacaatgcatagatagatctccaagaacccgtcgcgaacgacatctcatcatcgatcggggtattacatacagggcctgctacaatttggtcggtttgaagcagacaaattcgactccggtcgctctgcgacaatcatacaataccttcttgaggttctccagctcctgctccagctctccttcattcgatttccgcgagtaggcctgtgagatagcttcataaatgttgttgagcacgaccgtggcttgatccgtaatgtagtgcattaaagtttgatggagcaattccacttcgagtgtcgcctgtataatcgatcatgccgaacttagccggattccttgaccgcaacagagaagggtcgactcacttgaagcatccctcccatccccaatgtaggtatttgtcgtaaacagtcgagcaggatggtcgcaagctcaaacaaaagcgcttgaagcactcgttcaaccagtccggcagcaatgccgttgacttgcgaatgtacgtgaaccaggaatagcatgtttttgagcaggtaagggcggacctctgcaaagtgatgctgattagcgcctttggctgtcgatttcagagtcgaatcacctgacctgtaggtttcgagccttctgcccaagcggtaccattctgaattaaacccatttggctgatcgcaaggagcgtctctgctttgcgcttgacgaagtcatcaaagaggattttgtccagttgctcgaccacttcgtccagggtctctcggtctgcttccgtggagatcccatacatgttctcgaatttcgtcatgaacgatggcagcattgtcaacttgaggtggctcaagttgcttatcgtcaagagtacccgcgcgtcctgtcagggtgatctcgtcagcaatttccatttccatattaatcggcgacgcaatcgcctgactttatcgctatgccgcgcggcaccaccttccgcatcgaattccgagatcaacaacggctcgtcgtccgaaaaggcaaggtgtacgagtccatccagaagatagtataaggagtcgaagaacgaatttttaatcttggtgatgaacacttgaggcaccgatccctagacaacggcgagtatcggatgaatatgcgacggatctgaatgaggcagaacaacgcttaccttcgaaatgcctgcctctgtcgatcctccggctacttgccatgcaacggtagcattgtgcctttgcattgcagccacggactcaaggtatgtagttgtagaaggatctgtcccgctgagactccagccctcaaggtggaagaatgatttcgcgtctggctcggttccaccattcagagaaatcgagaacaaggatgcgagcaggaacaagaactcacctttcgaccaagttgcgcagatcgcctcttcgaatctccaccgacagctttccagaaagcccttgagcagatttcgaacctccatttggttacctgctcgctccccttcgattgtgccgccaatgccctccagctcgctcgaggtctccacgatgtccgccaggattctcgatgtgaaatgacaggttgtgatcgagttggaatgctggggcacaaagtcagggcattcattggctgtaggattgttcggtgatgacgcgatcgttacgtcagagagggtgaaaaattgactgatgcacgagacgtaaagtctgataatctccaaggtcattgtacgcgcttgactcagctggcgccggctttgaccctgatgctacaagggtcatatcgtgtaagcatggcagtttcttcgcggtagcatcctctgcgtgctgaccttcgagtatttgccctccatgtgccctttcgctatgcgccagaaatctggcaacctatccatcagaaccgtcgacaatcgattgacgagttgcaggatcgccccccactcctcatgaccggcagatttcgctgtgcgtcaaggccccatttaagcgaagtactgatgacttccgtctagatcaaacctacagatgaaggcatcgccaccctgtcgggtcagcctcgccacgcagcgccgcaggttattagcactctggtactcgtcgaaatttttcgacgcaatatcatggcgaacagctattcccgtcggaatatcagcaaatcagggtcatgcaagcgcgattcacgcattgaacccaccttcgacatgtttcatttgattggcgtatgcgattttgagcttgtccatgatctgataatggcaagaatccagatgcacccagacaggatcttccttgggcttgagctcgagcagaatcctacaagtgcagtttttttagcgttggtttcgacgtcaagaagaaacgtggcgcatgttgcgcctgtactcactcgatattcttctcaatatcctctacgtttttcccattcgcattccggaggccactttccagtctcattctcatctcatccataatcttctccacctcgctccaaatcttgtcgaatactcgcttttgttgctgccgtcttgcctctatttgagtctcggataaagcggatccatttgctttgtcgacaactggattcgtttcaccgccagtattaccaagcggcaggagctgattcggtcgagtatcccgcaaatagagacccttattgtaatcgcgtaacacggcatcgtacttcccctgcgagcgaagtatcaccgcgtggtaatcaggcgagagcacatggtgaagctgaaaagaagctagactcaccgctcgcatgtacattctcaagtttctcggcaacccgaacaaaaacttgctttgctcaaagacgcccgcagtcgactttagcttttgcgccttcaaggcgttcgatagtagtggcaggaagatcgtctcggccttgtgagaggtgactgatagccagggatctgttagtcagcatcttttgggaggacgcattctcgtggtctgaacacagcttactcttgatgatctctctggtctctctggttccgtgatccgtcccctcggccaacatgtccacttgcatgtctcgatagacggctagttatggcaagacgtcagttttgaaacccattgagctgatagcgtcatgactcaccgtcgttacttcccttaacccctacgaacctgccaaactccctctcgaccaggattctaacctcttctcctttcgattcgacgttttttcgcagatgctctactccgtagcggaggtcttgaaaagaagcgtccgggtgatgaagagacagaaacgcggacggcgagaacgccttggaggacagtagcgtgggtgtgactgttgtgagggtgtatactgtcagggctcgttcaaacagtatttaaccaaagaatcactgaccttcgtggatatccatatctctgggactgttgccgcgattttttagcactgatcaactgaaggcaggtgctcttgctcacattgccagcttgctcctgaggcccaacgggtcatccatctccttagacgttcctgttaggccatcaggatccagacccagttgagctgtctcttcgctctcaaaggcttcccatctgcttgggttcaggctcgtcaagccgtactgctgtaatactacgagatggcgcacatgaatagctgagtctggacctgcagtcgatactccttacaagcagcttggtcgattcgatcaaagtcggccgacatggcttggcgattgaccgatgactagtacaacgccgtatcagatcttgtaggcagtcgagctgtagctgataacgcctggttcgagagattcgctctgcaagctgatatcatgccgatatcatggtacatgcatgactactactcgccgtctcggtcgaccccgagcaagctcccggatcggtcaaggattgcttccggtcaacgtctgatatactctaccacgatcgcaagggacgagtagctagcacacagcagatgtacggccatagcagtacggtatcgctggacataatgaacggctcgccagtcatacatctaggtcggacaagcatctcgcaccccgcgttgcgctcacttcctcttctttgatgacggccgggatggcggagcatcgtcctcactatcgctggcatcctgtccctcggcctcctcgtccgagccttcgctgacatccccgacttcctcgtcccaatccacctcttcctcgtcctcgcctgcggtcgctccaccggcaccgggtccgaatttgtcttcatattcgaactcgtcgtcttcgtcggacgagaaccctgcgacctcttggggaagctcgtcttcctcgtcttcgtcctcgtcttcttcctcggcttcgtcatcgtccgcattagccttggacttggcctccttggccttttgtttcgcctccttttcggcctgttttcgagcgacgttcgcctcttgttgcttcctgcgagcttccttggtcctcaaacgggcctcatgttcagccttttgccttgcagcctcgctcttggtcttggcgactacaaacaacgggaatcgatcggttcagctcattcctcgattgtcgaccggatcggacatcgagtgcactcaccaaactcgtggaatacggtctctccttcacctcgcttgcttccgaccagaccctcggcgatcttgatcaacctaagttccatcctgggcccgacctctacgagcctgaccgcccgcctctctcccttcttgttccctcgaccgacgtaatcctcgggcaagtctaccgcgttcgaatcactctcggcctcggacccgtccgtctcgctcgccgagtcccatcccgtcccggtacccgtcgtatccgtgtactcggtcccagcgtcggaaggcgcctgcgaaccgtcccgttttctcttcaagaggtaatccgcaatgtcgtccgcgttggaaaggtcgaccttgcgggaagacctcgacaggggctctttcccaccggcggtggtcgagttgaggatctttcgcactcgacgagatactccgtgtggtcgtacggtgatgttgtagtgtcggatggagatgaggttggattcgggatggtacgagacaagcaacactcgacggaaggtaggcaaggccgactgttctcagccgtgagacagagtcagatgcggccattatcctcctagcgccgattttggactaaccttttcgacctggataggcgggaaaagaccttggaacatgctcgtgatcaatttcaagtgaggcttgggaggctgcccagcgggcgtctgaaagttgttcatgacgagctatataataaggtggagcacaggctcgatcgtcagaacggggatatgatggacttcttccagagtcggtacttacaagaggaggcgtcctgtattcaccacctggtgctttacccaaatttcgcaaggaagcgttgacgagatccctacaagcggaaaagggggcagaaattacagtcagtatctccgttcccacctctatatcatcgagccgaacgctcacttcatcaagctatatcgttccactcggaaggtcaacgtcggaccggtcggtagcctggccattcgaaagtgcacgttgttggcctctgtcaaggtgaacaccatgatatgggtgactcctagcggttgagccatgacgaggtaatctctcagacgagcggcatgtcgttcctgtcgtcatgcgtcatggatcagattcgggcaaacggggacatgacgatccataaggcaggaagagtttcgataactgaccttgagtcgactggccgtaccgggctccatgacctttcgcatatccctgaccaactgatttgtactccgtgtcactgcccctgaccgaaccacgaaagaccttgggccggactcctggtcctgcatgtcgatcgaggcatgagcatacagaatgtcagcggtccaacgcattttcggcaagtctcgttcgtctccgcactaacctcctccggctgagcgcccttcaaatgagttctagtctttcttctgcgttgtcccatgtttgattctcaatgtttaagtggtcttggagatcttccttgcgacggtgttcagcatggaccgtctatcggaagatctttcaacctcaacatatgcacgcatgcaagacatgatgctcgagagtgtgctcagccgagaacttattcacggacatcgagtcatttcttgatcagagctagtttccattcgacactatctattttgatgtccgttttctcgtcatcatccggatgctatttacgagcaatcaccaccgcacagctcgaacttggctgagatgtgggcggcgggttgcatggatatcagggtaaagatagacctgcattgcccaaaatctaccccaaggcactccgtcttccatcaggattatttcacagatcgaccttgagaaaccacatcccgcacaatatgagcagacaaatcgatgccctgtcggcatacagtctcatgtcgatatgtcgaatcggagcggcaagtcctcgtcgtcgcacttgaccgataaacctcctgaactgatctcctttaacgttgcaccttagatattctccctatttacatggggtctcaggggcaactctggtgcatactctggtggctggaactttcccatctacctttttggaatcgtggctcacgaaatgagcggtttcgctgcttggcgcgaggtgagcttcgtctatctcttcctctccgcttcctattctcgctcgtcacagtcccgttcgttacatttcgaatctatcgtcatcactgaccaaaatgcatcctttatgctgtcccagttcgtccacattctcttcccgtcgctctttctcgacggattcgccgtcatctttccctctgggatcctcggcttcatcctcgctggcatctcgctcgggctcaagctcgccctctactttagctcgaaacgcgtcttgctcgaaagagggggcgaggctgtgaacggattcgccagtctcgatcctcgacgagccgtccagactttccaatcgagtggaggcggatggtcggcaggtaaccccggtgggcagaccttgggcagcgccgaacaagggtccaaccagacgagtgagtcgggggatagttaccggtggattcggtttcagagaccgtctcgttgatgcaagcacttgatcagtctttgccatgccaggtgctttatcttctaccccgcccccttacgggaacaacccggcttcgaatggtggaaacgctggcaagttccctggcagtgggttcactttgggcacggatgacgacgcgcacgaacaagggcatatccccggacctggcaaccagaccggccgaggtggctaccaagctgtaccttagagacgaagagtcgggtacggcgagcgaaatcagattggttgactttgagacaaagtcgcgcttgatatgcatgatcaactatctatacagagagttctatggctagaccttcatccagccgcttgcaccaacgaccttacatacgcttcctggcgtacggactgtctctcccggtcgaccgggtgaataaaagaagcccccctcggtgcccaccgagatgccggctatgatctcggtcttgccggtcgtcgaggctggtagcctcacggcgttttcagttggcaacgtcgagaatgacaagagaccagatcgaggtgtcgccttttccgtcttgttctcctcacgaggcttatgcatgaactgcattaccacgcagtagcggtctcatcagcctccctgacctcgttgggcttgacgcgcatacgaaatgcctctcacctgaactttttggcccgtccgcaggggcgcttccatgtcgagcgacaatgctccccgtgatggatctcccgacaagatcctgacgacctctctaggctgttgcggcaccacgtcgtatcaatctatgatggctgtagttcggtcgatcaacgccaagtcgcttacctcaccagtcccatcgtcgccgttgccccagacggccaagtaatactcttcctccttcatcttcttgccgagactaaccccactttcggccgagcccgcttccgagggccgcatcgcttgcgaagccgactggaatacgttgagtagcttgatcaagacttgagtcggattcgtctgtttctgcgtcgaatctgcgatcgagggatggaaagagagcaaaaggttgccttgcgcactgtcggacacacggtatcttatgagccgtgatccttgtaccaggggaagacagagtcgagatgcgctcactcgtcgatcgtctccaactcgctaagtggggtcagaccaccgtaatcgatcccaaacgtcattcctagcgtcgaaaacgccggtccactaggatcgtccccggcagacgtctcgcagaacgccaatcccacagctccagcgtcaaagatgtctttgtccctgaacaaggtgtgaggtttcccggtcaagaagggggtgggttctgtcaagagtccgagctatgagggaagacggcgataagcttagaccacggggactagtcaaaacactgcacaccgtgcgtaccttggaagcctgtgggaaatttcgatcgagcgatgtgattgtggaattggggaggctgtcagaaagtactagcatgtgcttgactccactatagtcgcgaaggacgaccgtcgccatcagtcatcaaatccccctatcgagtcgtatatctcagactcactcacgttacgccatccagaccctggagaccgtttagagctcccgactcgcccagaccagttcctttacctccgtcggcttgtaacctctctgacctccacaagccttcccatcctatcgactcccccttttcgaaccctaacgaacccatcaacaccctctcaatctcgccgacgtcttcccccttccgatcttcctgcctcatcacgctggacggagggttccgctcggaataggacagttcgggtcgatgccatcgtcctacgctgacaggtgggaggcctaggagctcggatcgaaagggaattatcgtctccctatcattcgatggtgtaaacgtcgcaatggtgacgaaaggatcttcggcgacttcggcgttctgagcagactgcagtctggtggccgactgtgcgaaagaaccgatcgaggtcatgccctttgatagtccatcctgaacggcagacaggaccaaggagatgtctttgagctctgggtgaagtagatagactcctacagtcttgctggagagagatagggattcgagttgggtctcgatggatttcggggtcggatggcggatagtgtgcacagtggtgtgaagctgtcgattacgagcgtggcctggcgttgagcgccagagagcagctcggagtctcatcatcgtcgggtcgcagatggcaatcttgggtcgctgtttgaagacctatataagagtgtgtatctgatgtctgctttgcaaaaagagccagtctcaggacgattctgaacaattccctagataggagaagctggacgtcacaagatcacagaacgcaggacaagatcgcccgtgccctcggaaccgatcgtcgatcgcgagattctctcctctttttatttccacccaagcataatctcgcgcagtttcagggtggaaatacgatcagctcatcaatataccgcactactcacactacccctatcttcatcaagggccagccgtcatatatagagtgtgtgcacgttgtgccagcaggtgatatcctcaaggtcctatttacggcctcgctgcaagtatcgatccggtcatcgactcgctcgcagcgttctcgtagatatccttatctcccctatcatgcataatcctccgacgacttcgtccccaccaagcggtagcagcgcgtcgtttcagctcatcagcccctctgatctgccttcgggtgagttttcaggcggatatcacttactacgcttctggcatttatggcgttcgagtaaatcacctttgcggttcaatcgcagatactcccagtccttccgatatcaaggtcaaacggaccaatgatccttacgctgatcaggaagcgaggtggcacctggtcaaacaatacgtcctgagcgtcttgcaggataagccctccagtacgtcggtctacctcgcagcggtaaatgccgtatatgagatcgaaaccctgggcgatcacaagaatcgctcgggctccaggatctatcgagaaggcggagtggttcttaacggtcttagactccggctctctaagcttctgctcgcctaccgagcgagatttggttcagcaggatccgaggaggatcggatcactgatgaggttttcatcaagcgatggactaaagcggcgagggtttttggatatcacgaccgtcactttgtcagacagtgcactgccgagaagtctatcttgccggcggacctgccgttcccggataacggcaggacgacgattttcgaattcggcagacgtatctggtttgatgagagagagattgaacaggagaaccgggggccggtctccatggcacaatcacacttcaagagaaattgagcgcactaaccgatgagtggcagtcagccatcagagcccgatcacacccctgttccgcttttctcgctctgtattatattgtcggaccctcacatgagctcctctcctcgactcccgatctcgtgcaatcacatgtattcatcgtaatcgtaatcgttcaacgcttgtcctagactgactcgtacacaccggcccggacagatcggacgataaaagggttccgcttcacgacacgtgcgacgagatagtccgtttcgaaccgacggcggagagcaaaaaccgtgtgatcactccgacgaagtgatcagctcaaatcacaagtagttgattatgtcgaaatccggctattatctcgcgttccccgagacctctttgtccgctcttcacctctttgtcctgcgtgaccttcgatcaaccactctttgttaccccttgtttcattaagaacaatacaaagcacagcacacttgctattgttctcaatccttattgttctcaacgacatatatacacttcctattcaggttctctatcggtagatcatccttgtaatatcatcttcatgcaagctatacaagagcgatctacccgatattcaacagattagacagaccgcttgaggtatagatacccagcccgtttcttcatcaaggagtcagccatcaccccacagaccatctgtcatcacgcattttgcacaaactcaaacgtaacatcacacaacggaatcagaagataaggaaacaatgtccgacgggtatcaatacaagagcagcggtaccaacgatcaggtaagaccattcggtcccgctcttctcgtttccaatcgctcataccttgtacatttccgttcgacgtgcaggggaatcactactgcagtcgcgactatggcgattccgcccctaaccagaactcgtaccattacagtaataatgacggaagttattattactccaacccgaacggatcgacctactacaacgatggtcaaggcaatgccaactacaaccccccttcgggcaagtagggcaaggttttccctcctctagacacctgtctctttgttggctatcgagggcaactatagctcggacgggaatgccatgtcagaggcgtgatgctgtaacgtgacgaacgagaaccgagacgagagagagagagagagacattcgatggaaacgatgagagacatgtgcttgatgctgatacaacgcttggccggcatgagggaataccacgtcttgggctaatgctccgcggacgattttacctgcctgaacgtccaagccgtgtagtgcgtcttgccgatcctcagcattcgctgatggatttccgggttcggcaaggtcatcctggttgacattgaagagacgctcgatcccgtctggggactccattctggccgtaacgaaggtgccatgacgctgtgatcgatatggaagcagccttggcaacggtcgtccggcacgtcgtcaacatatggcacatcgaattcagatttgcatatagctcatagctgcacagctgcggcatcacggttctctccaggtcacatcttgtcggtcacctgacctccgttcggcagcgttgaagcgacctttcgccaagccgtgcctgaacatttattgtccggcaatttgggtttctgaagaaacgcggcagcgagacgatgcccggtcattttgccgcctcgtcatggtcgccggactaaacttggggagagctatataaggatgtatcaagccagctatctcgattgagaaagcagctcatcgacgttaccatcaaccgttgattcttatcacacagaccctacaacatgctcttcaaatccagaaacgttcgcgcaaccttgactggtctttcgtctcagcaaggtctcctcttggatgtgcctgcggacggcagactagtggtctgctcaggcgataccctacggggtgtcgttcagctcgatgacccgaccaagatcgagtctttatgcatcgagttcgcagggtaccaagtgagtttaccgacgggtttcgtgctcccatctacgcagacttacatcttccctcgtctcgctcacagtacgtatctgtggaagccatttcaactccaactgcttacaggacgaggggactcaatacagtcacagcactgggaggctcggatgctcaagtcggagccgctcgagctagtgccaagcccgtcaaccatagggtcgctaccaagttgttcacgaccgtccttcagatcagcaaggccgaagctgctggcactggaggggccgtcaacttcgactttctcgttcccgaccgggatgagaagggcgagcgtttaccaccttctatacagttgcactccactcgcttcgcaggaggatcggtcggatactgtaagcaatgacgttccaatccctgtcacagccgacactaaatggtttctgactgggcgtaatgacaggtcgatatcagatttccgtgctcaccgagcggaagagcatgggccgaacaaagtcgtgagctaactgccctacacttcatccagtaagagacactaccagctgactttgtgggagcgcagcgagagtacgattcttccagtcctatacatgccattcagcccgatcacatctttgccccaactaccacccatctcggctgtgctggcccgaacgacccccaaccaggtcccaccagtgccagagaagtggaaatctgaagtcgtcaaggaagcttgggaagtttcggcttccggcggcatctcaggcctattccggaaaaagtcgaggggtgacgacggagcaaccgatggagtggtgcgagcacaggtcagacgatttggtatgcgggcgaacgagtgacttagctgatacacccctgctgtgatcagttttcaaccccggatctcgatctttggccttcggggcttcctatcccctatcaccttctcttgacctttacttctcgaactccctcgacgatcggccttactcggtccgaaatctcgttcgacctcaagcagcggatccagatcaacaaacgatcggccggggtagctcaggcgttcgaagatatcttggagtccggctcgacaggaaaacaattcggcttcgagatgaccaaggacggtatttggtctggaaacgaagaggacggggatggatggagcaagattatggtgcagatgggcacagtccaggtgaccggactacccagtattttcaccagtgttatgagcctcgtagtaagtgattgagccgttcgtgaaagttcctccaaagctgaacctggcggctggtcacagtaccaactccggctcaacatcgctctacccagcgattcggtctttgctggcaagaagaagactttcctcttgattcagcccatagtctcctctcccatctacgaaggtatgccggggttaccaagcgacgaagaccaggcaacggaacgaaggatgctccttcaatcaatggttaggatggtgggcaagtattattgggatgatgaagaggactttggctggttccgcggggatggtgcgggcagtgtgggcatgtccggcgagtcctataagaagctggtagtggatacgacctgatctcagtctcgaggataatttcgagcgcaggactatacccctgtaaaataatgcgctggaccggttcccaatgtataatcagataaatataccccttgcaggttttggaacgctcaaaataacaagtcatgatcccggaaatgctccctgttcactgattgtgatgcttatttgggagtgagcgagagcctgcggatcgcatgagtaggaacttcatcttcgggatctgggcgatacacgaaaatgcgacctctgatgggtctcccaacacgtgcgcagtcgcagacctgctcagctggcaggccccctgtcgcctttgcctgctgttccgcgattacaagtagggcaagcgagtagtgcaattcgtgagatgcggaatcgagccacctttctatatgaccagaagtcgactgacatgggacatgcgtatggtggttccgaccaagaaggatcaagactgatcgggagagcgcgagaagcgcggatcgctagtcaggggggggaggggggaaataagccaaaacaagtgtttacttgacctcgtcaaatttcgacagtaccacttggtcaacctggagaactcccgttaagctgagtaggttggagctacatgacaggactcaggatatgtccgactgtgtccgtaggacgtctctgtcgaagtcgaaagctatacacgacaagaagtaagaagcgatcttgtcgggtgtttcatgttgatcaaagttctacgtaccccgggtagggtgtaagcgatcatactgaattcaattcgccgagaaaatttcggtggatcatcgctaaagtaggagtaggtaaacaaacaacaacagaccaatccaccacatatcaagcgacgttgacaaccaatctcatccatttgatacctggctaagattccaagtcacccacgaacgacgatcagcgctcgaacgtgtctctttgctagtcgcaacaagcgggccttcggcttcgcagatcaatcccttgttccaaacggtcggcagctgtggaaaccaactcgaaggtctgataaccttgtcatgtcccctactttaccaatccctcctttgcacacctttgcaacccgggacaccgctcagattcttgcacccaacgacacccaaaagtgagatgagaagaacccaagtcggttgaccttgcacctcatgtcttttcgcttgatcccttgatttgaagggtcactctaggggttgctgggtaagccttcaattcatgttttcgactcgatatattgacctatccagttcttatacgcaggggatatgtcttgttgattgccattcgtcagtatcttaacgaatgaccccagaatgttgctgataacgcgttgattggccccggatagtctggcacggtatgtacatgtcaggagagtcattttgccggctctcttaccgagaaaactcattgacagctccgcttctgaacaagatcatctaccccttcaagctgctcgtaagctgtgatttcctggcgacagccctcgcaggccgaatcgcaccggcgactgaacatacctcctctccctgccacccggcaatctactttcattcttctctattgatctggaccgattccggatgatcaggtcgttgggatgcacgaagcgtaagcagtcaatataaacgttcacagacaaagttgatcaggctgacgggtccttgcatcatggcgggcagatcccacgctttcgctggcgtgagtccatgaatacgagaaagagatgtgtgtacggcactgacgaacgattgccaaacgatgctcggatccatgatataggtcatcacctgtgccgtcatcgagtctatccagctcgatcccgatgaaggaggtgcgactaggatgagaggtggagtgccggctgtgagtttaggcgatggtggcggcacaagacctcttttctaactcgtctttgcactcgatgctcgatcacagatcactctacccgcaggctatctcggcagcagtttgatcggggctgcgttgattgcttgcggattcgatatcaacgccagcaagatgtaggcttggctggcgtctgttctctggaagctgctaacttgtacagaccgtttctccgtctgtccatccagtgcgacctgcgtcctggccgtcgggtttctcatcacgttatggtgggctagaaactcctggattgcatggatcacagtcccgctctttgtcggactgcttgcggtcagtcaaattcgattggcttactttcagtatatctttagacctctgactttccggttgtcgatcttcgatctagctttgctggttgatatatgactccgtgcccttacggtttctgattctgttcatcggtgtcatgtcgtaagccttcggaaattgacggttacggagaagttaatgaggcttattccactccatcggcgaaaggtgcttttatgccatctgggacatcatcgatggtaggatgacagtttcgtgacacatttccccgatgcctgacgtctgagtctccgtagataccatcaagaggaaagtcaatggctctgatgcgagccgctttgctgccatgatcggtttcttcgggccacgagtctggggtacgcctttcaatcgaagcacacctataccgactcatacctaacactgatcgagaatctttcaggtttcatctggctgataaactctatcatatgtaagttcgcctcgaatagacggcttgggcgacattgctcagggtctcgtttgcttagtcttcgccggtggcattctcgttggagttgccgcgtttaagcgcagcagcgccgaacagcgcgaagcggctgatcggtttatgggaggtaggcttacgattgccgacctgatctgacccagtgaagctaatcgcccaacctttgcaaggtacccctggatagcttcacacctcttacgatctgatgcgttgtttctccaatgtgggctcgctgtagctctgcttctcggtgacaaacgcatgcgtggtataatgatgaatagagttacagtgcgagccagacaaggacatcgctagcgatccagaacaactctactaggacccgccaatacacaagagagccgtgcttgttggcggcttgagcgattattcggatcggtttgacattcgcagaaacccagcggcacatcagatgaatgcaatgtaaagcctgaacaacggtcactatggttcgcccggtagtcatcgcctgcgacgaatgatggtcgtcagggtcgacatagcatgcgggctcccagccgggacttgccttcggtgtctcccgtttgataaggcaggacccggccgaggagatcatctccacaacggaaggtccctcagccagaaagcctttgtgccgcatgttcgttccggaagtcaaggaggcgacaatggcaaggacacgcacaagcgcactgaacgcgtatccaatgcgaaacgtcccttccgtgaaggccggtaagaaattgtgccgcggtaacagaattgagtcaacggtagtcgattgcgctggtatcgtcctggcgttcgtgacaggcttcgtctcgtcaaggatgtcgtttctaaaatgtgtccaatcgtcgagcgggctcgggggtgtgggagtgtttaattctgtctgtctgctggatcgtaacgctggcaatggacccttctcagatgtttcgaagatgtcattcagcaatgggacggcgggacgatgctctggttcccaatccatctcttctgccagagcctcatatcgtgcaggcgagttgcgtgcgggagtccaggatgccgtgacaagaaattgaattgtcgatgctgtaaatttgccaagaatcgatcggacagagatctcgacgggctcgctgcgatatgagtcgggcgcagacatggaccctggccggatccacctcaagcagctgatgccatacagccgcaactgctcaatcagagtgaaatcaggggggggtcgaccatttcgggtgagcggatgagtgctcacagcaaattcggtgataatcccgattcctaacgctctgtccacccctagggctttcaagacgagcgtagcaagcctcagtactgagatgagcctttcacacgcttgccattcgtgttccccttgcattcgatctgaccgaaagcggaacgctctccaccacggtaaccaagatctcgccagccagtaggccacggttccgaccattgcgtatttcacgcttgtagtgaaagctaacgaagtgtatgccagtgtcccgaaagtccacccaaagcaaccagctcgccagaaacacagttcgacgtccaatccccatcggcgggccgttcttctcattcgactgtcgggaagcgaatcgcttgagtttctctcgagttgctccgaccgattcagcgtagcatctgcccagatcttctccttcatcctgctatcccgctcggtgatgatacgtttgatttttggttcgcacgctatgcaagcgagaggatgagatctttcgaacgcctgtatgtcccattggaatgtttggaaggcgtcctgtgtcgccgagcgagtcgatatcagtgatactgtaaaacacgtcgcccaatgtcgactcacatcgtcgtcgccgatatgataattggcatgatagtccaagctagcttgcaaactctcttcgcatcgtggacaaaacggattttctactggagatgcggcgattctctcagaaaagacgtctggtgcagaaaaggtcggttcagttactggagagcaagaaaagaagtagtattgaaagaggacccacctgtttgatcatctcgcctatcggtagctgtggcagctacgacctcgtcaccctagcacaacgaatggtttagtacatgtcatcctatgctaccgagtggaattctaacccacctgactcaggtttctctgcccacacaacggattgacgcaattccaatctgatatcacagcgcgttcgaccagcgccgaatgcccgcaaaaatggcaatcccgtctgaccttgcgtgtcggccatcgcagtcccagcataccatgtgatcaagatataagacgctagccttacaattatcgaaggcaggaagggggctatgactagtaagggcgaaagtggttgagcatatgaacatctactcaagtacaactgacgaacgtcatcgctctgtgacccttctgcccgttcgtgtcacgtgatttcggcatcccccagtagaggtcggtcgtcgaatacgataggcattcgaaccaaatatatgctgaaatgtataacggtacagcaatcaaaaaaggagctaccagatcatcagaccgtgattgtggaatagacagtctttcactcgtttcagtggacaagacacaaggtggaagcgacaacgacagcaggcaatctatctctgcagaatccaaaaagtcatcccggaccccagtgcacaacatggctcacatcgttgatcggctagacatgccgtccagctacaaggacaacaagaacagggtcagtatttggtagcttgatatagctcccattcgactcactaacgctgaatttgcctacaggtcagccgcgacgacgagcgaaagcaattggcaacatctacaaccctgtatgttggaaacctgagcttttacactaccgaggcccagatatacgagcgtaagtcggaccccactcagtaggatcacggtgatcaagaactcatgtgggatactttgccgctatctatcagtgttctctcagtgcgccgagccgagtgaaggaggtggaatcaagcggtaggtcttgtacaaacgcatgaaggagaaaactcatggcgctgatgagtcttcccttcgatagtatcatcatgggtctcgaccgaaataacaagttagaaacgcttctctctaccttctcgcccatttctcttgctgaataaacatttcccctatatcttcaggaccccctgtggctttgccttcgtcgaatactacctgcacaccgaagctctggcctcgatgcgttacatctcgggaaccaagctagacgagcggataatccggtgtgatctcgatcctgggtacaaagagggcagacagttcggacgaggaaagagcggcggacaggtgagtgtcggatgaccggaaaagaattcactatatgaaggctgatccaattcgacgttcatgttcttcatgttcaggtgcgagatgaatacagggatgactatgatgccggtcgaggtaagtagatgaaatagaagcggagccgtcaactgctcctaactttcaatgtttatggcaggtggttggggtcacgaagccgctcaggctaagcgaagacgagagctcgctgcggccgatacgtatgccgccgagggcggtctcggtcgggatggagcgaacgtgccggtgggagccagcgcagatggtaagccacggcagcatatactgcatcaaacctcagatggactgatcgcgcttctggtttttagcacccacgaggaaacgtgcgaggtccgaagaggaagaagacgaaggcgtccgagatgtgagttcgaaccgtgatatacctagtacgccagggctaatgaaggcctatcgcattaccaggcacctccaatgcgaggagagcgagacgacgacgacgaatgatgggggggggaaacactggcttgtgtattccgcccttctttcgcacttgtacacgttatcaatgtttatagcaccttcggtcgatatttcctgacttgtgccctgatacgactcgctgagggtcgtttcatagtaccgtttaaaagagtcacagccttgggtagcagtacactcgctccgctggcatgcatttctaccgaccgatcacaccaccagataacaggactcgccagcaagacctatgtagatatcgtagccaggtggatcgcaattatatcaggtctgcctgacaaatcactgcatgattaaggcactcattgctgctaccgatacgtctgcctacaattttgatatgcccagcatgccaggagcgatgcaatgagctaagttcaggctatcttgtcatttccctctccgaaggtcaattggtgatacatgatacggatacttgttttaaccgtctcgcacatactagtggggattcatagataaccgacgcgtactcccaaaggcttcgctcctcctgctatcagctcacttatccttcgtattactattaacataatcgtcgaacggtgccttgtaatcgtgatgccagcgagaaagagcgggccggttctcagtgatatcgccgacggaccaagcgatccgtaggttatcgaggtcctgcaccgtcaaatccatatcagactgtgaacgcgttgtagaaattggccaacgaacactcaccgacgtaacgtcattgtccgggcagacgatatagaagtcacctcgagacagcctgtccagcatgtaggcgacggtctgctcaggtgtccaggcgccgtcaggcttcggttgggtgcgacctcgatcacctgtatggacccatccaggactagcatgcggtttgaacgacagaggatgagaggaggcgttgtattggacagatcgttctcactcacacaaacagatgtgcgctacacttgctaccaggcgcatttcgcagctcgtgtgctaattgttctgtcaggctcttgacggccgctttggaggcgttgtaagcagcgttcccgggaggagacgtgataccttgtttagaacccgtgttgatgatgacggagggagtctcctggcgggccctgctcgaattgtggttaaactatatgtttaccgctatttggaatcagaccaccactcacatgaccggagcaaagacctgacttccattgagcacgccgccaaagttgaccgacatgacttcctcccaagtcttttgaacgtcaccgacgggctccgtgagcgagaatgcaggagcagactttgttaacagggcagcctgagaattgaaaaatagcgtcaatctggtgtcctaggctcgagtgttttgatttgaagactgacattgttcatcaggatggcgatatccccgtgcaattcgagaactctctccttcaacttggtcacctcagcgatcttgctgacgtccgtggtgacggcagtgacatcaccagcctcagcaatcgatttgaccgcgctgctggaagtctgcaggaggtccgaattgatgtcgaccatgacgacgtgcatccccgccgaagcgaagtgcttggatgccgcgaggccgatcccagagctgaggtcgcaacgaaagacgggtttcagttcgtgcgcgttttggcggtgggaagctggcgacgcttacgccgcaccggtctacgaacagtagaaaacacgtcaaattctgataatctcatggcggggtccaacctatataggacagctcagactcaccactacggcacaggagcctttacgaatgatggaagcgatacctgcgaagatacagttaggcgcgactggcgggtcgcggggtacacaactggacttactggacatgccgtagataggagaattcgactgcggatgtgactcagtgcgaaaacggtctagcttgactcgaacaggactatctgctgcgaggtacaggactaagtggaacgtgattaacatgaccacgaattctcagctcgatcggtgcccctcatcaatcagaagccgatggtgaactcaaaggctcaggtcatcatcactactcggccgaagccgaggcttctcgatctgctagagcaaagttgaacgcctacttacacttccttgatcacggttcattatcatcgaacttttttcactgctttccagataatcaccatggccgtcacatcccgaaacacacggaaacaacgtaggttccgagtggaacatcatcctcggactcatcatgctgagtagacatttccgtagctcggaggcaggcggcagctcagccaaccgaaacctcgcgaggatctaaagacgatgcgttggtcgaattccgtaatcggcggatggcaagacaattggcagagctagaagtaagtcgctttttcttgaagcttgtggtataatcgtgcctgtactgatgtcactcacgtcatctccgggtaatccaatagcggactaatgctcaagatgtaccaaatacatctttcgcgtcacctatctccttgaacgagtcaacaacgaccaagaccctaccagcaggtttaccggcctcgatagccctggtcgacgacacgaagaggaacaaaaagaaacagactaccaatgtccggaaccttttgatgtacaagaagtcgcttgcagaatatttggatgagacggtgagcaaaggcttcggattgtcaatcacctcattcgctgataagccgagcctctacttctagccggaagatcacccttatttccaagcgacatcaacaccctcaaagacgccagcaaggaagatatgcagctcatgtggtttcacgggagcatactcgtgccctcgctgcggagagtgtagttgttcacgtccctgcctagatattcacgaagccgaaggaggttgtgggatcggtcgttgaatgcacagatcagcataatttccggagcccttgacgacatttgatgattgcacggactaggaaatccatttagctggggagagaatctgctcgcaaagtctggacgatatgtcgggacatcgataatgtaatgtatataggaaccaattaacgaaatcgaaattctcgccctgcagcgaaaaggaaagactacttgtcctcctcatgcatgcggactggttggtggcaacggaagaggactttgtgcggcggggctctttcctggtagtgctggcttgatcttcattcgcaaaggcgcgacatgttcagacccttgcctaaacggggtcgagcttagctaagacttacgcccgcgccatccgaacccttgttcgtttttgccataagagcaaagtaatcgcttaattgcaactcgagagcacgcttctgctctcgcatctgagtgagctcttgcatatttcgcgagacttccgtgttgagcatgttcttgaactcttcgatatgaactggagacgcggacaaacgaagaatgagtaacaagctcacgttcaatcgaccgtaaattgcggtggcgactcacggctgacgttgacgctagttgcctctcgcatggcttccacaaaccgcagccgttcacctcggatctcgcttgtaaggtctgagaatactgccgtcagtggccatcaaggctgaatttacctactcaaaggtcttaccagtagccatagcgcgaagaagctgctcgttctcttgacgaacgttgtcgagcgatgccgtccaacctgatggagagcaaaaaaaatcgttgttgagatcatgtttatttacagctaaaccaggtcacttactgttacgatcttcgaccatggtattgaggagattatccactctctgggcggtcgaggcgtcctcgtctgtcctctgtttctgttcgagcatcaagccgtgtacttgattgactaaagatgcgatacccggattggccggagtcgaggatcccccaccatcttctacgggagtcggctccggggcaagctctgtgacgagcctttccaatctgcctgcgacgttctgcatctctttggtgcttccgatgacgaactgttctagccacccattcagctgaccgagatctgaacgatcaaaaagccgttagtcaaccgtgtcgtataattgcggtaggaaaccgattctaacatttggccatgtccgatgtctgttgcgcttgcgcttctcgcgccgtctgcagtccttgtaccatcgatagcacttccttgacctggtttttgcgattgcccaattgtaagcaataagcgcgcagactgctattcactcctgctgtcttacctgatctacgaggactgtgtgttcctccgtcatgccagtgatcgatttaactaggccatcatcgactgcaggaactggtccgcttgctacagaaggaaccgctttcgctggagtctcggaaacctcttcgggtacagcactgggctctactttggcaggggatccgaccattttggggaccgcttgagcactagtactcagtgcaagcgctagagcatcgagtttgctgtgcacggcgtcgagatcgatcgcaggggtctctacctggttcaacgcgctcaacgcagcgatttggagggaattctggatgtctttgatgtccaggtgaacggtatccatcttgctgacaagaggagatagaacccgaacggcttcagcttggcttttaattgcatctgtttgttcttgcaacaacttggagtgggagaaggcaagccgagcctcggctcgcacggtttcgagttgcgctggcagatcagcatcggatgtgcggatggcgtcttcctctagctgacccgatagatgtaaatccttcggtaaggtttgagcttcctccagagcagacagttgcgtcgcgggtatttcttgggtttcgctaggagaatcgctcgaggtaccatagatttcgctttccggtggcgtatcattcggtaggaatagtggcgtagttaacatgctgtccttctgcatgagtatcccctgcggcatggtaatgtctcgcttgtcatccggcagcgtggcggtagcggagtcttggcctccgcctaaagggaatgtgcaagcaggagcccgtggacccaagaggctgggcattttgggctgcggtaagggtcgggctggaccacggggatgagtactgatgtgcccacgggtctgcatcataggaccgacgtcagaccgggcaggtccggctcgttgcgatgccgaccttgatggattcagatcgctctcgtcaaacccaaggatctcatctgagcggttagcagtactgagcaccgtcccagaaacgaaactagcggtgcttctggtccgtgctagtgatttagaacgactgaaaagcgacaattcacgctcagcgggaagcgccgagtcaaagttgccgaatccagaacccgcagtcgaggcttccaatctttgaccactgagattggccagtgtttgtccctccactggtgtttcaaacatgccttgaacgctgtttctcagtgcggagcccattcgcggggagggccgtggcgtgcttcctgaagacattctcaaagtgctgacgctgttgggtgtagcatcgcgatttcgtatcacgagtggaccgcttgaaggcaaccccattgagaatggggtgtaaaagacgctatcgctatgattttgggttcgaccttcactgggcgtggtgttatgatcaatgcgctgcgacgacagcactgcgccccacagtgcgctgacccaaccgagtcggttggaaagaccttcgatagctatgtacctcttgatattgccctcttcgagacatatttccaggatatccgcttgagtgccgtctttagagaaaacagcagggataccttgagtagccgcttggcttgcggcgatcgatcgaatatcggtgcaatcgcgcattttgaccgataaaggatgacctccggtcgattcgctgattcccaacgtctcggcagtcagacgtagttctacaggttgccaagacccattagtgtccgatgtggaacatggtggaggcagaagacaaaatccagtcgattcccggatgacaggctagtgagaagatgatacaaaaaagtcagcattcggtactcggtcttcctagattccgcgacaacatagcttacctgagacacctcgagtgggggaaagtcgggctgcatctccgcgtctcccatgcgatcgcgcgtcatcggtgcttggtatgccgttgctacgctactgctgagtacgctatgggcaactcctacattatgtcccaatccgttttcagcctccttttcccggaaccgagggagaggttgcatatttccgaatacatcctcgacggaattggtacgtccttcggccctataggctggcacgctccatgaagggctcttgttgcatttgtcgattgtcccagcccttcgacgtccaacttcggtcttcaccttgtttctaacatcgtgtaatttgccaataaagtccttgaggggactcttgcctttggtatgagagcctttcaaaggcgaatgtccggcattccaaggagacgagctttttccgttggcacgcggaggagagaccgggatgacgacttcttcattagtccatgtcctttcgggaggtctaagaccccggtcatactggttcgcatatggatagattgccggcaatggcttgtcacggttgttggtgtaggatgccgacagttcgcccctcataccagctcttccacttccgattcgcgattccgtctgattggccctggcagctggaggtgttccaagaccgatttgacgtgctgatcgcttcataggcgtcgacgggagggacttggcctcagcagctgatgcggtgtccagatccgtcttggcttcaaatcgatcgataagtgctttcgctcgaccgatcgtctctggacctttgacatcgcgaacttcgacattctcgttttcggcttctgctgaggtgccctggatccaagctgcagtcctgacggtcttcgctgaaggagctctaaagatcgatgcggcggcggtttgaggagtcaattgaggcggagggaccctcgtttgcgttggcagagctttgctcgttgagaaatgagctagcgatatggtcttgctactcccgtcattcggtggcgtaaggggcaaattgtgctctttcctcatgtcggacaaggtcggcgtgagcaagttgaagttcccttgctcggtcgatcgcgtgccttgttcagatagcttcggtgtcatggcttccatatcatgaacagcctgcaacctgctgctgtctttttcacctgcccatctcgctcccgaggtagagcttggtggtcgacgaaggttgagaggagccacgttgggtagatgtatcaagttcccgcttgaagttgtcaccaaacttcctaccctgacgtctcctcgcctttctgctagatctcctatatccgcatcacctctcgaaccttcgccgtagaaggtatcgatgccaaacgattctgacgtttcgactggcgactgaagatccgctagatgaagagtagaagtccttcggcccagtagcgtaccagtcccggctgcttcatcgtcgtccacaagaccagcaaacgatggagcacatgtgcaggatccatcggctactgtggtatggcgggataggtgtctattcgcctgccgtgacgatcgatggctaggcgagcgcacactctgggcaggcgatctgtcatcgtaaggaagggtgggcttttcattcgtacgattttgtctggatccgtgggtgatcctgaaagcgtcgataggaggtagatcgtcgttgttgttctcgatcatacttatccggtttcgaatccccccagtattgcgaagtgccatgatactaggcgaagctttcattcctgagcgttgagtcacggtatcatgatcggcgctttggcttttgccgatggactgaatcttcgagctgacgcgtttggaaggcctcgagcgggtcggggtgatcgggaaagtctcctcggagcccgatcccgacttcgactcgagggcttcaagtgccgcagcgatatgactcgtccggctacccgtacgaggagtatcctgtagcgattggcggtccggcaggggagacgacgtctccgtggccatggctttgaagaacagcgcagtctcgggtcttgctcgcgtggcactgcgtatagaaggcgatgtcggatacccggtggtccatgatgaagtggctccgaacaggggtttcctctgagagccgtatctgtccgccttggctctcgaatggtcatcttgtccttcgaaagtcagggtaacctcttcgtctgcttccgggacatccatggcctcctctggtggctcagatagttccctggtcgtctgctcagcatcatcctctgctgtctcatcgacctcctctagtgacgatgacttttccttcttctcggaaggttcgtctggaatggtgacgttggtgctcgcccgtttgtaaaacggtcgcgaggaagcagaagcaccgtatccatagtttcgctgggacccgatctgcgaggtcctccatcctgctttattgggcgatcccagtcgggtattgggacttccatgatcccagatatcggtcatcaccgtcgactggctcgaatccgtcataccgctggccgtactcatgtacgagtcgcgggatatggcggcgggagggaacgttcgggccgtgcgactcatgttgaggtgtgccgactgtcaagtcgcccgtttgtatcttaattccttacggtctcagctcgtctaaagtactggaaacgttcgtactcttcaagtgcgtcgtctgctgtcaagatatactaaaaattatggtggggctagtctaattcgaaggggtccaagttgtatcaattccggtcagagtcctattatgagattgtgttaggagtcccgttgtcgactgagcgggcgttgtcgtgttgtctctactgccgatgtgtttgcgattccaggattgatttagtgaccttcccaaccttccaaagcttacgcataccatattcttgagattcaagtcggaaccacatccaaacgaccggggatgtttgggagttgaagcatgatctacggtgcatactcacttgtacgtacgcgtcgccctcctccgacgcacctcggcaagtttttcctatcccgctactcgatccatcgcgtcattccatacgcacgcatccacccgagtaatcgcttcggagttgaccgtgtcggcacctgaagggtcacctcgcgatctcgtcgacgcgccatatggtcatccacctccatcatgatatcgatctatggggaaccggtaatagctatcggatgaggccgcgggctgacaaactgactagatagcgcaatatcatcggccaagattctcagcggtataaattcaacggcaggaattcacaaggctaggattcgttgacgttccaacccgaccgaccacaatcaaaccgatcgatcgcttccaatcaatatgcgacagcgagccggacccatccacctctcaggcagtgacctcgagaaagactctctgcctcagcacaacgacgtctccgacaccgagagcaaatctcgtcgggacgatcatggaaggaggttcaaatacgccttgctaggcgtgctggccaccctcgctactatgcacctcctgagctctggtcccttcttccccttgccccgacctcaacccaagagcgctccggactttatcaaggccggtttggcaagatgtgacgaagtccgtagtatgcctcccgatacctcttcctttgccaaggaccggacgatctccgacaggttcgaggttgggaccaagcctgtcctgctgagcaacggaaccctctggaccggagctgataacggcgagcaagtcatttacgggggttccgttctcttgaaaaatggtatcgtttggaaaatcgggaagcatgccgatgtcctggcggagatgaccacagagggtctgatcggggatgatgaggtggagactatcgaattggatggcaaatgggtcagcccaggaatcgtcgacatgcacaggtgagtagaattcctccggtcgcttaaagtccgtcaactgaatttgattcctgcagccatgccatggtcgatgccgccccgagtctcgcttcttcccaagataccaactccctgcaagccaatatccagccctggctcgcttcggtcaacgggttcaacattcacggcctcgagctaccgctcattcgagctggtggtatctcgaccatgttgatcttgccgggaagtgcgaacaacatgggcggtcaagcctttgtcgccaagtctcgaattactagtgaggatacgccgagcagcatgatcctcgagccaccctttgcgatcgtgcaggagggtaactctaccacgtacaagaggacaggacactggaggcacatgaagcaagctatgggtgaaaacatcctccgagttcacgggaaaaacaggcttgaccaagcggccgagtttagaatggcttacctcgagggtcagaagctcaaggaatcgcaggacaagtggtgtgcgatcggcaaagagaacactgaaccattcccagaagactacaagtacgaggtcctggccgacgtcattcgaggcaaagtcaaggtcaatacgcactcgtacacatcagccgactttgacgcattcgcccgactgaccaacgagttcaagtggacccctgccgctatgcaccacgcccacgaggcgtacctgtctcgctcgttggacaaggtatacggagacaagcccgctttcgccttgtttgcgaccaatgctcgttacaagcaagaatcatacctcggatcaccctatgcgccgtacatcctttccgagactcgagacgcggatataattttcaagtcggaccatcccgtcctagactcccgttaccttccgtacgaagcacagcaatctgttgcgtatggattgaacgcctcgaccgctctcaaggctatcaccgtcactcccgcgaatcgcctggggctgggtcaccgagtcggacatctcctcaaaggctacgacgcggatgccgtcgtctgggactccaatcccctttctcttggagccacgcctattcagacctacatcgatggtattcctcagattgaaaagtcgttcaccatcgtcaaacccgcgcatacgcaaaagatgcccgagacccgcgacgtcagcaaagaagctgccgagacgatgaagtaccgtggtgatcctcccttgaggcccaaacagagcgccaggaacatcgtcttccaaggtgtttctgccgtattcctcaagcgcgatggacaatctgttcaggaggtccagcttacgcgaggggatgccgccgcagatctggccgactctcgcgtcgttgtgacggccggtgagatcgcatgcgcagggtccgactgcgcggttcctgcgtcggatgattacgagtcaatcgacttggaaggaggcgtaatcaccaccggtttgacgtcttatggctcctacatgggtctgatggagatccgtcaagaacgggtcaccacagatggcaagatccctgataccttggccgaaggcgcgaccctcctcgaggggatggtctcgtacggcaaagatggtgcgctctttggcgggaaggatcaacttatcgcttacgccaacggagtcaccaaggggatcgtgcatcccatcgaatccggtgtattccagggtgtgtcttactcttacgctaccaatggcaaaactagtctcgatggaatggtagacgacgtcgcggcggttcatgtcggacttggccaaagtttcaagacctcgactgccacacacattggagtcttgcgagccttgctttcaggcgaatatcctgaaaagaccgaattgacgcgtctcttccagcgcgttgcgaagggcgatttggtcctcgttgtcgaagtcgacaaggcggatatcatggccaaccttattaggctcaaaaacgagttctccaatctcaagatgacctttgtcggcgctcacgaatcgtggctcgtaagtcaatcaggatcccttttcccgtattccggctgacgttttcattctcggcccggtcagattgcggatgacatcgccaaagccgaggtcggcgtgatcgtttctcccgcacgatcataccctggatcgtgggactcgcgacgtatccttcctggactccctctgagccctgaatctcttcctgtttacctgcacaacaagggaatcactgtcggcttgggtattaccgaagagtggatggcacgaaacattcgtctcgatgccgcttggacctacatcaacgccaacgcttctttgaccaaggcgcaagccatggagatggtctcgtcaaacctggacaagctgctcggtttgaagagcaaggagaacgctggctgggtggcgtggcaaggtgactttttcgccatggacggcagggtcaaggcggtccgtggggaaggtcaagctgccgtagacttgttctaggttacgagctgcttctgtccggtggttaaaacctggtatccgcggaaatcgctagctgtatatctacgagatatccgatggaaatgagatgtttgaaacagcagaggacactatgcgcttctcggtgtgtcacgtgatcacgcttgttcgaaatgatcggaagcgaatttatcgattgggatttcaaggccgatcaaggcaaaatgacaaaagtcgagaaggagcagacatccacaacgatatacatgttccggtttcgttctcgatcaaacaaaacccacctctagatcgcacaacacagaccaggaagctgcctctatatcacgagatggctgctggagacgcgaccgcgacggctcccgtcgtggactttgagacggctctgcaaaatatccgtcggctatcaaattcaggtctagcccatcagaagaaacctgctcaactcctcattgccctcgaagacactctgaagtctagcttgcccgacgtcaatggccctcctttctcgggcacggcatactttgcatcccttgtgcaatgcttggaaaaggcatgcgccacaaaatcgaaggatgctaaggactactcggaaggaggtctcatccctgccactctgtatttgatggcaactgtcgtctcggaaacgcccaagcaggttgtatccaaccaactcaacaccttgcttcccatcctcattcctctcttcgacccatgcttgtcccaccctcccgcattgcggtcgctagtccaaatcttcaccaccatcttcctcttggctcccattggcctcctgaactcctcgccacttctcaaacgagcatggaaccatttcctcgagcttaatgtggaccctcgacccaaagttaggcacttggctcaagagggtgtgagaaaggtcttgaccaccccgatccctcctaagatcgttgctggcgatcacccttacttgcctcgagctcgagattgggccatggggattctcgatgaggagaccaagggcggtcagaacaaagtcaagaaggtgaaattcgccggaggtatggtgatggctggtgccgaggatgccgagggcaaacgcgcaatctgggtcgttcagggcctgaggggctgggtctcggtgatggatgaggatgtgagccgtaacggcctcttcgcttacatcgcctcagctgatgaaccattgaaatttttttctacacttcaggacctctcggcgctttgccctttgcttctctccctcccccacacgcctcatttaacccctcaaatcttctcccttctcgcccacctgctctctcccgctccggaatacgcgtctggcatacccaaggatgagcaactgcctgtcagggaattaaacaacttgccggtaatcctcaacgcacttttggaatcgccacctccctcctctgcacctgccgatcagatcgagtacatccaggcgctttcatccggtatgctcaagctctcgatgcaagatgcctacatcgcttcgaaggaatacttttcgaaggcttggactgtcctctggaccaacatcctgacccaccccactgctacccccgaagcaaggaggaaggctgctgagggtctcggttcgcagggattgatccgttactgcgtctcctccgagatgatcagtcaagctgtccagtacaagaagtttggaggtgatcttgagtcgaaacgtcaaaagatgaagcctcctcttctcagcaagatccttaaccaactggagcgggccatgtcgactcagcccttgttactgccttacctgctgcccatcttgacggcactggtctcgaagatgaggtcaggcgtcatcgagaacgaagatcaaaccgacaactcgaaatccaactcgcctgcgcagattttgctcctcgatgccgttgtctcggtggcagatctcagagctcagcctgggttccaggataaagaaaaggttgacgatgttgtcggaatggcctttgaggtgatgggcgtggaggctgtccttaggtcgctccctctcaacattgagcctgatgcgtgagttgacagtggcgcagtctagctcgtcaatgatgcgtgctaatacatcacgaacaggtctggtaaggttccgcaacccggccgagcacatctacttcccctcatgcgatcaaggatcaccaacgactccctgacgttcttcaccaacaagctggtcccgatgtccgagcggtcattcgaaagaaagatcaaggctgaggaagggaagagggcgggagaagccaaagtttgggaagtaatcatcggacaaatctgggattgtctacccggtttcgttgacctggctagagatctccgcgaggtgattagccgtgacatgtctctcgcttcccatcgaggctcacgatcttgcgttacctcagggatttactacgcaattcgcaagtcttttagcgcagctgttgtacggacaacctctgcttcgaggtccgatccttcgagcgctttcgaacgtcatcacttcggtccagacattgtcacgctctggctctgaggctgaagaactcctgaagactttcggtgttgaccagcaagatgcggctcaaaatgtcgctcacttgaaaaagatggcaggcgagatgcttgcggtacttttcaacgtgttcagcagtgtgccacgggagcaaaggggtcaggtcggtgacgttatcggtctttggctcggaatcatggatgaaaaggttagtccgcaaagcacaacctggcgtgtagctttgcgactgacgagctcccttgcaggaaatcacttccacatacgagaaggtcacttctcatttggccagcgcgctgtctcagcctgctgcctccagcggcggcctgccacccgtttctcatacaatgcttgatctcttgatcatcttgattccccaccttccttcggctccggccactgccctcttcaacgccgcatcgaccggcaacctgattgagaactctgatgccgccattcagaagaagagttacaggattttgactcggctgatcgaactcaacaaggccagcgtgctgaaaggcgaaggcttcgatcaattcgttcagaaattggtcgatgttagcgctagcattggaccaggtgctcagcgggtgggtcgtgatcgtcagctttcgagctctgagttcgatagctaatcatctctcgcctcattaggaccgaatgcttctcctcatcactcttgtgccgatcttgcccaagacgaggcttcacttgattcctacgctcgtgacggaagctgttctcggcacgaaagaagtcaacgagaaggctcgaaacgcagccttcgacctgctcgttgtgatggccaaaaagatgtccgagggaggtattgtcgaccaacaaatgctgaaaggggacgatgtggaagttgacaaggatgacgagggaatggaaggtagcgcgcccgctggtaacggtaagtggcaagtcctcagaccttcgtgcaccggatgtctgattatattgggtttctttatgtacagctgtcgccagtgtacaggaatacaccactatggtcgccgctgggttggctgccagcacgccccacatgattagtgccaccatcactgccttgtcccgcttaatgttcgagttccaaggtgagacatgcatactgcactgcgttgagtttgcgagactgatatcaggccctgcgatctagatgaccttcctcgcgacatgcttgacgaaatggttgcgactattgttgttttcgtagcatcgaagaaccgagaaattgtcaagtccgcgcttggattcgtcaaggttgcggtcgtttcgctacctgagagcacgctgcgcccgcagctcggagcattggttcccgcactcttgggttgggttcatgaccacaagaaccacttcaagaccaagacgatccacatcttcgaacggatgatcaggaaattcggttacgattcagtctaccgaaaggccggagaaggcgatgagaaaaaggttctagagcacatcaaaaagaagaaggaccgggctaagcgtcagaagatcgcgcgagcgcagaacggagacgaggacgaagacgaggtgagtgaaagcgcatccgggacaagtccaagacatagaccctcatgatttttacgtctacaggccgttcaacggaagagctccggcaatgccttcgatgatgcgctgtatggtagcgctagtgaagagtctgacgacgaagaggtcgagaaggcggtggctggcaagaaggctcaacaaaagacgaggaagggcaaggataccggcgcgttcatcagggaggatgacgatgcacccatggacctgttggatagatccatcgctggtcgagtcactggccagaacccgaacgctagcaagcgccgtcgacctggtcaagatgctgctgatttcaagaccgacaaggaatctggcaggatgattatcgatgaagatggctctgaccaagaaccatcggcaggtgacgtgctcgcaggtagtgcctaccagactgccataacctcggtggatggaatgagtcgcgacgctaggggccgactaaaattgaacaaatccaacaagcgtggtcgagcccttgaggctgagaacgatgtggacatgcttgaaggcatcatggacgacgacaaggaccgcaagaagaaggccaagcgagtgcccgagaagctaggatcagagttcagatcaaaggttggtcgtctgttcatactatgtgtaaccgagcttgcactgatccttaccaatgattgcagcgagcgggcggagacattaaacctgctggtcaagacgtgtcgccatacagctacgttccattgggcaaagctaccaagcagaagggtcctaacaaggtcaaccttaccaacaagaagcgtggatcaagacagtagtagacgatgctcgtattttggacggttgtattatagatgctttgccctttcacgacctgcctattcggatctagatttgtacacggaataccaaggtcgtcttgtcgtaaatgtcgtcagcgtcttcctggatggtttggatgggtgatcaatggcacgtggttgcagacggagattcaagtccgtgtcgtggcagggcgagagctcttggaccgtttcgccacgtagacctcgttgaacgagaggcggactgcaaggaatttgacttcgtaattggaatgcgattccagaccggtaatcaactctgtcatgcgcgacttgaacgatttcgtctgttccttgatttgctgttcgagatctgcgagctgtgctgctgacttgtcgccgttatcggtcaagaccgatgcgggaagtacgccctagaaaggtcaaccaaaggatcagtaaagttggacaagagacaagagggacatccacacacacgcccacttacccgttcaacttccgctttctgggtcaaacgtgtcttctctgccacagatagattatataaggcatcctggaagcccatctgtgagtcgggcttcattccgtggacctcgccaagcggcttaccaattgccgcccgaatttcattatttgttccaagatcttgttcaccactgcatgaagcgagttctaggttttgaagcgatcagcttcagccttgccgtatcagcgccaaatacccacatctttgggatccctcgggttggtcagcagtgccttggccattatgttctgtaaatacgtccggtgggccataatcaaagcgtctagatcgccttgtctagtgcgctcaaaatccagcatgtcttgccaggccagctcgatcgcttccaattgacagaaagcctggagctccgcgacgaagtgtatcatttgggcttggaggatgtgacatcgatgccacacacgttggtaacctggtcgccatgtcgatcagctaacgcgttgtccaaacatcttgagactgagcaatttacccttaagagtccggaaattcctgggctcaaatgtgctccgaagccaccgcttgctctgggaagcggctactcgtctcactcgccagagatacatgaagatcttgtcataatctcggatcgcagcgtcgtccagcactgcattgatcggtgcctccaccttgtattgcagggagaaacagtcccatccgattgcgccgctcgagaatggcaagatctgagcatcgagccttcgcagaacgtcttcagattcgtgccgggcgttgctaccttggattgcagtctcgatatcagatgcaagatgatgacgtagcagtttcgaagcgtcgcgatccagtctcgggctgtgtacgaggtaagctgtctatctgggataatttctctgtttcgctgcactgacctgaggccttctagtaaaatatccgcgaaatcgccagcacaaaggaggacgtactgtcgcatcgcttcgagatgctctagcagcttgaaacggtcgaaaaagatgtccaaaaggcgcttgcttgccgaggaataggccgcgtctattgtcctttccaagtgagcaatgtcaccgtggcagagaactggcgagagggcagaaattcagattctgtggataacgcttccacctgcaaactcaccagcatcgtgcaccgaagactgcgcctggaccgaagtccaatcgctatcttggcagctgaatctgataaagttgatgctcttgccggtgataaaaatctgttcattgacccgattagctgggtccgaagtagtgcacaggatggcttccggacggaccttccgaccgaattcttcattcacgaaaacaggaagcatgtctttgacgaaaatatatctcttttcccaaatcatgtatgggtcgtcacctccgaactcggcatctccacttccaaatccataatcgccgtgaggaatgtgacgagcgacagaacgcttggcgatatccgcatccaactggatgaaaaactcgttgaagggatcgtgtagttgccctgaaaagatccagctttggagagacttgaagaacggtttcgagacctgtgaatgagagttgtaagctaatgaagtcaggctttgcggcttctgggctaagctgacctcttcaagtacgtggtttgcaaattcgcgtactgaaggatcgccatgcagtgtatgagcgtgaatggcagaaatcagtgcaccacctctggccgctgtcgcacaggggatgcgtcgtcagctatcatgcccgtacgattcaagccgctctgataccgacttctagcttcgtccacaagcgtgctcatcatccgcattttgagggtcgattcttccgtccacaaggcaagacgttgaaaggtcataccagaattttgaaccgttaggtcgtgatcgacgatccgacatgactctccactggtttcgctactcggcggtagatctgattccgtacgcttcatttggttctccagtaatgtcaagagctcgtgataggcggacaattcccgttgcaggacgaagcacaagctctggcagctttgcgatcagcctctatatcgggttatcatttgtcgactgaacttacttgctcggtcatgccgcccgcccctaccgaggctcccgcggtggcttgtgcaactctgacgaaattgtacaccctccggtagagcatgcccagttcggctagcaccacaattgtcgatctcagagatcccgaaacctcctgggcctgtctcacaagcacgacatcttagtacgaaggcttcgatcacccatagttccaacgactcgtccgcttaccataccggcatcgtcgacaaaggcgactcccgtaatatcgtcttcttccacaccgccgccaagtagcagatcacctctcgcctttcctctgcgcagatctttatccagctgagacgattctcctttccgagtgaattcgatgtccccgaggtaaggattcgcttcacggttcctctgagcttgcgtctttcgcccaaagcggaaatgtttcccgtcgataccctgcaataggtagagcatgtcccgaagaagtagcgaagtctctactggtttcgcacctgatgagaagtatagaaggttcagcatgacagaacggcaagattcccaaactgtaagagctcaccagtctttctcttccaagtcctcaatatctcggctcttgtcttcccctcaatttcagaattgtccagggttggcagttcagtgggcgagttgggcgcatccttcgagccgggagtaagagattccttgtcggcgaaacccggaggcggtctcggctgaagatccggtacagaaacaggcctagatatccttttcgtccgctccgatacatcagtcttcgacactcttcgtcgcagttccggttgtctgagagtggatcgcgatcagctaatcgtcctcatgagccaaaatggtctcgctaagctcacgtgtctccttccctctggcccgatcgaacgactggcctcgagtattctctccgtttaccgtcggtcatatctctccgaacagctttctctccgtttgtctcggctgctggtagactgcttagagatggctcccgcgtccgactcttcgactcgatccccgtcttcacctccgtcccggcaggctcgttcgtttgctgcgagaggggtgtttcacgtcccgatctcgactccggtcgccgcggttcggctgtagacatctttgcagtctaattatcttagaacttgtctatttcgaggttgttcgcagcctttaggagaagccagatgaggctattctggctcttcgaacacattcaaccaacatcttgatcctgacgatgtagcttgcgtttgtttaccttgtgccggggctttacggcatgttatggaatgcaagcgcgtctcgtcgcgcttctccctcggtgggccagctctcgcagctctgctgtttcagcttcctctactaaggtcagagtggataagcagatgctagttctgccccttttcttgacattcgtcttcctttgtacgtgaagacgaatcttgccctgggtcatgacgtgactgaatgagatctatgagtataaagatgccgagctggccgtagagcaggcgattcatagtggagacaacaagtcaagcggcatgcagagatcttgtccagacaacgcaccaagcagaatctgaatcgatcatggtttctctttcacaggacgatcttcaggtacaggtcgacatcacaacttcggattctcggagcttcatatgtacgcgcatcgtgctgcatgccctgcttgcgagcttgcacttgacctacagcgctgtcctatggcacgtacctgtgggtaggtccgtaatgatagtttcaactcggtcgggtagctgacttcagattttcgtgaagcattgcataatttgggatctttgggcaggtattgggggaccgaagaagaatgggacatgatgatcgacttcacgcgtttactctctcaactcggaatggtctacatatgcttcgggtatctggaagccagctgctgtacgcaaaccagcaaaaccccaatcatccatcgagtaggattctctttactctgggaaggtctgttagcaagcttgtggatctgtaagtcataccggactctcttcgaagcttttcacggccgcgcgcgtctgaccgtcaaccttgaaaagacgcattccatcagcacggagtcaggatgatgaccctggcacgatacgatgctacctggctgactctggttccgttcatcacgaccatctcgatctgcatcgcatggtgcatctctttcgctcatctcctggttccctttgttcatcggctatcgttggccgacgagattgccctgatgacgctactcggccgaggggtggaagcctatccttggcctgtagaggaagcgcaaatacgactgattgccgatcaattgatggtcgaacttgatttggaaacagctgatcgtattgaccagtccaacctaccagcacgagcaatggaagagaaatgcaaactcgtggtctatgatttagtctgagagcttgaatcgtgcacaaagaaaaaccctattgtttaaaagcggctttgtgttacgtatcatgtattttcggagattcaaatgatcagaacgagaaaaacattagtgatctagtgatcagcgatcagcatgtcagccatcgatcgaggtagcgatcttcaaacagaggcagcaaagagcacgaaggaccttacaatctcgcttagcgcgcagtccccttcttttccgactgatcggagattcatgccgatcttcatggaaaaaaaattaaaagctcggcggaccaacggttctgagagggtaacaagggatctgcggtggagtgcttcgacatacgccatctctacgccacgtgcgaatgcatgatcgtacatgatcgtatgaatgtctttgttgcggctgatggctcatactcggaattgttgggttccgatgatcgacacaaagaacaaaaatatcccgtcatcatgcgcccgatcgaatgacccgctccggatgtacacgtatataggtcgaacacactctgtctgatcttgtcacgattcgtcgattacgtcctcccagcgtattgaaagggcgaatatcgcaacaggtcgactgtagtaagttcagcgctgcgataattatcagctgctaccgaatccctctctgaacttgcttctttcgtatctccatagcatcattaacaatttcatctacagccccgcacgaatacggaaagacgatcgcttgtaggtcatttctagctcgcatacgaaagtcgacctaagggggtatctaaggcttcatttcgcagacttgcaaagaatcgagcgctgctgaggcattcgggagcatcgggaagcatacgtgattctcctcgatgtctggatcctctggctcgttcggcgtcagcccgttcgccgaagagcctgaacttaccgaggcggaacgcgacagtattggaccactggccgaatgggtcttaaatttggtcagggctgcggaaggagctgtgagtaacgaaggaagtgagctccaatcatcgtgggctagggggatctaatatcctctcgctcacaatgaatagagcatgtatctcgacgacctttactacgaacttcgtgaccagcatattcgtggccctctcatggacgaagtcatcgttcatattcgcttacaccatctcgtcatctggcaagatactccatctgggactcttgttcggatcacaatggactaagggtcgagccgatcttcaaacatgagaacactggcggaccaatccgagactcgatacatgatcctggcgtttggatggtgccgcgatcgattcctcagaaaggcgaaatgtccggcgtggaaatctgcgcgaggctcgcaagtgctgaggaatcggccgcggcactgtcttcgtgcttgggctgtgaatgtttggttcctgctatatgattctccgtattcccagtgacacgctttgttcaaatcgatcgtatgccgtcgatatacgtcaaagacgacgcgactgttacgagcttaataatttatgatacaacgtcatagtggtgtaggaggcatctctcgcggtccactcaactcggtctgtcgaatattgcagtgaaatcaggtatctttcgagccgtccaagtcttcacgtgtcagaatagtctctcctcgtcgtgtcctccagctgttggtgatttcgagtacttccttgtcccaaaaccaaatgttttctcttagccatttctcgctgacctcccagctatgatggttgagcgtgtcctctgatcagtccacgatggtgttgaaaagcttcagtatacgccttcgcattctcgcatcaaatgctacccaccccctggaatcgtgaattcgtcgaacatgccccttacgacctcgataacatcgtactttcctattagatgaggagatataagatttctgagtacatcctaagaagttgtactccttgcgctcacctcggagtagaatgagcttgtcacgaagggaagggaagatgatgccgtcgatgatatgttctgacggccgagtattcctgagccttcacgtaacagacatatagttcggaccagactcaccatgcgcaagattgcgttgtaagggagtcggtcgcaacgatgaaggcagtacataggcgttattttgacggtaactgaagagatagagatatcagcatgaccacgggtgagagggaagtctgaaaggacaaacttggtaaggtgatatccgatgagttgcatagcttcttgcgcacgcccctccggtagcatgaatgcctgccctgtactggcaggcacgtcgggactgcggagcggggtgccttcgctcctcgattgcgattgcgtcgccaacgagtgctcgttcgaggggcctcctactcttacaccgtaattcggctcgacgcggcttgactcggaattgagattgggagctggtcgccttccagcttcttcgtcgttgcttccaccgtgtaaagggtagtcgttgtatcgaggaaggcgtgaactagattggttgtcatccatgcgagctctcttcgctggctcagaatcatggaccacttcaggaccggttcgtttccgttgaggcggttcggaaggactggcatcccgggtcgcgatacccaatatatcgtcaaaattggaatccttggccgtcttgtggatcccgctctcttccttttgcctagcgatgcgaagcgagtccattgcttcgtgagccggagcggtttcaggccgattcacgaaggcgtcgagttgctcgtgactcagaccgagacggggtaagaacgtcgccaggcctgatataaaccaaggtggcaaataaggtcagcagaagatctaacacgattgctaaatgtctctcaccttctccgataaaccctgagaggtctttgaccattttcctgagctgagcgctgtccgaacgtagagtatcggccacgaacgtctagtcgcaacgatattcaaggttacttacttctcggtcaacagattcttgaccaggagggaaatcgcttcctgtctctcatcgcggtcgccagatagcagttcgactctggcctgtaaatctttgatctgagggaagtagaggcgcttaacggacgattcccactttgcgccgacctgaccgactgacttgttgctagcaaacacaatgaaaagccgatatgagctctttgatcggagcaagctgtggtagtcgatgagctcacctgctttcgaagtctgaactctctctgtgcgattcggttctggtctcgcctagctattcgtaaggaatggccagttcagcgataatcccagaccagtcacactataacaatctcataccttgagccgatctgcattacattccttgatgttcagtaagtgccgatgagcttcatgtggagcaggaccatacgcacactcctgcattgttattgctaccctttcgacctttgcctgctcgtccggtctccggacttccctcgccatcgtcattttcagagcccaactcttcatgatccgagaggcgtcgactgttctgtagagatccgtatccaaggggttcgtcgtcatcaggcatcgcatgcgtttgaacgggcgataacgaacgccgaagacgatttgtcgacgtgatggaaaggtttgtcatggatcatcaggtcagcgatcgacgagtcctctcgtcataatgccggtcagtaacctccaacatacgggcatatttgcagatggctagtctcctagctctttcagtatatatatgttcgcgatcgcagcaaatgctctcctctggtgaacctcttccagttgtaacgcagaccaagaaaagggtcgatgtatgcctagacgttggcgttcgaaagtgacggtgtgagtgcaggtgagcgagagatcgccaatcacgcagccggtgccgggagcgactcgtcaggagaagtgagtcagcgaaacgcagcaagaaaacgtgtcaggcgcgtccgggagccagtttgcggccgggccccgatgatggtatattctatggtcgtgctagacaagacggtttacaacgagtcgaagaacgataaatcctgagcggaaagagtagctcgcttgtcctttgtcgaagacgatgatgcgttcaagggcattggcgggtgacggggtgtagaagcggggacttccgtaactccaagcgacaacggcatgtctctcgattgtgcggtgttcgacgaacccgccttggagaaaaagtcgtttggccctggtggaggcgacagtgcgtcgggtactggcgagggaggggctggccatcgaccgcgcgattctgcagccttattcaccagcttttgagccgcactttgcgtctgcgtatcggtaaagccgaaattcaactctggaggcctcgtcggtgcctgggtcgtgctactgggattgaaaaagcttaagtccattgcgagagactgagggcgcggctgggcgaccgtaggttgaggtgatttggtagaagcaggagcgtcgaagccatcaaagtcctcaaagtcatcaaagctcgcctggttgtgattgccttgcgcctgcgccgacacgaatgtctggccaaagtcaccaaattcatcgtcatcctcgttattagcagtcgtggtggtgggcgctccaacgttcgcgacaggcatcgacgccggtgttgatttcgatggtccagcggtagccgtattgccaaagaagtcaaagtcacttggcatagtcgtgggcttggtattttgtggggtgctggatccgcttgccatcagtgcgaacaggtcattcgaagcagtcgtagatttcaccgaggtaacaggtggcgatggcgatgacagatccaggtctccaagcatgtcaatatgcgagctcgatcggctgctggctcccaacttctgaacagacgctgccgaagacgtcctgctgctagacaagggaggaggcgccagacgagaaggcagagcgacaggctttgaactaagcatggattcgagactagccatctgttcgtttctaccagtggtaccgctcatagagagcagatcgccgataccgggttccttgggcgcggcaggaggagctgtaggtacttggtcaaggaacgagaaatcgtccttggtgagttcgaggtcctgattgttgacgtcaaccgatggtgtggacgccctgggctttcggaaccggccgaagaatcgacccatcgctcctgaagcgggctcgctagcttgttcctgtgcagccagaggagcaacggacccaggaagcgatgatgtcgcggtctttatcgtcgggctaacgatcgagggagttgccccggcagacatgggtgacgcaatttcctgcgcaatcggtagcggcgttcttgttccggatggcaagctagcactaccggtgttactgggtgagagtgctttgacctctaaaatgcctcctccgctagtgaccattggtaaaacctgcgtggattgccgtctgccccagaaactccacttcggacgagcctcttctgcttgcgcattcgcttgggcgtccctttgcgcctgggtatcgtcgaccctgttgcggctctgaaactccttttgccattccgaagatgacctcctagcggctttcgtagcagattggcggctcacaatcgcaagtactgatgttctcgtgtccagattgatctgtgacagggcatcctggtatcgcgcccaggtcatgctcatggcgaggttgtgctggaaagtatcgatctctgggggcatggatccgagttcgcgcgcaagtctaaagggggaagacgtcagtacaaggcttgcttttcttcaagcgggcgaaaacatactgatcccgtgcatcaagcatctctcggcttaacccttcatcgtcacctggcgagcctgattgatctgtagcgcgtttcgatccgtagcattccctagctaattgcctccattccctctccagcttggccacaagctccgaaggctatgatcgggcaagcgaggtaagagacgtatagcttggcgaacgaggaagctggagcgactcactgcgactgcttctctccgttcgatcgcttttctcgctcgatcccactcgtcctcttgttcccctctaccttgtacgatattgccgacttccgcctcttcttcttcctctgatgcgccccatgcgtccgcggcaaccccgccgctagccccgacctgcaagtctggggagccgaagttcggacttccccaaccatcatcgtcatccttgtgagctggctcccacgcgggcatgggtgcgggatcgtccagaccaccagagaaccctccgaaagcatcatccccgaacgagggggattccggtatcgtcgtgcgaaaggtgggaagaggggatgtggggttgggaaaggcgggaatgtcgaaatcttgatcatcggtagggaacggcttgaatgctgggtagtctgcgtcgacgtcccgagtcggagtatcttctggagttgtagacgatcgaaagccgtcgtagcgattgcccaatgcattgctcgctgggatcgaggtgggcagctcttcatgctggacctctccaccttcgaagatgctaccttgatccgtcgagattgcgaatggtcttgaagattcggaacgatctacctcgtcttcagacgatagaatagtcgatggtccgtctacatcggctttgattgcaggagcgccccaaccaccatcatcatcggtattagactcccagctggcaataggtacaggcaatgtcgtcgtcgatcccagctttgtgacgttctcgcctagatcatcgtccaccggggtcgattgctctacgatactcccccatgggtcggcagatgtagaaggccgtcgttctagtataaagtccttagaaacattgagcggatctcgattcccgatatcttgttcatcttcggcttgtttaggagctgtccaggggtccactggtgcagaaccccacggatcgtcttccatgttcccggctacgaatatgcgccgtgcaggacgttggcggtctgagtttatcgtacgctcctgtaaagctaaatgtcgctcaatctcgtatggatttgcaagtagaatcggtgcgagttagtacaaggtatagggtatagctcgagtgtaggggccgggtgcgaggtggaggtttgttgcatcgaacgcggtccatcactaacgaacgacgggaccgaaccaggagccaagagggtcatctctaccttgactacaagatgatctcgatggtgttgccgctcatgaacaacgactttcggcttgaaccactcgtcgttagacatcttttctactcaaagtcgctagactccgagtcacccttcaatcccacttacggcgagcagaccttctcccaaccacaccttggcgacggttccgctcgactttcaacaccatgtcagacatcgatgatgaactgctcgacctcgctggcgaggggaccgataccgataccagagctcgaaaacgcaaaggcagcagcagtggaaacaataccaagtccgcgaaatacaagtctcagtgagtttcggattatacgtgtgccatcgaggtgagccgtgtaactcaaggagatcccctggctggcgcctttcagagatatcatagacgatgacgagacggaagacgatcttcccaacggcggagcagcagccgatgaggaggaggaagatgacatggatatcgacttggagtctgaagatggatatggagatcgaggagctgtacaggaaccctctgctcccaccacggcgcagacgagcgctcgggcctcgcccgatcgcagtagcgaagaccctgaggaaaggcccgctcctgttaagagggactcgagcagcaagagacctaaacctaaagacaagaaggtaccggcacccaaaggtcgagctgtgaagaggaaggctccggctagcaagccagtgagggagagtgctacggagcctgaagctagaaatccgtaccccctggagggcaagttcaaggacgagaatgatcgcgactagtgagtcgtaatactgtaccctatcggtggcagtgatgtttatattaaagatgactaatatttggcacccctccctctctctctcagtctgcttgggctgcccgagatcgagagagaagagatcatcgcgtctcgtctagaggaacaccaaaagtttgtagacagacagcagctcgctgcgctttacagcaggacgaacccaggtgaagctccagctcgagccgaagaggaagacgatgaagacgcagagggcgaagaggatatggaaatggacatggaaatcgatcaagacagcgaggaagagctcggtcgaggagcgactcgtgagtccggccgttcacctagtgaaggggttcgacgatagctgacgtccctatgtgaatctcctaggcgtaaagaccacgtcggaacccaaatctaaagccttggacaagttggctgaacgacgtaaagcacgaacggatagggcaaacaacagggttcgtcgaggagattcaagaggtccgctacgacgatgtgttccgcgctgatgacaggctgggattcgtagacgacggtgccaaaggcccgaaagcgagacgatgatagcgatgctgaatcgctcaagtcggaaggctctgaatatggcgctcgacctggcaagaagagccgacgcggccgatcggtcgacatgtactctgatgaagagagcgatttcgatcgaaacgatagggacaggagggacaaaccgaaaaaggatgatcaaccagtcgacctggagactatccatcgggtacaactgacgcgcgaggatctggcagagtacaagcataggaccttttttgacatcatgatcaaaggtgagcattgcgctgccgggagcgctgatttcatgccattactgaccatgtttatataggagcgtatgtgagatgtatcgctggtcaggacgaacggaagcaaccgaagtaccggctgttcctgatcgttggtgagtaggatcgagtcaggccggccagcgtccttgtcagaatctgatgcaaatgacacttataggattaaccggtgaggagcgcaagtacgagatggacgctcgaggaaaatcgatcccagagaaccggcgcttgaaccttaaatatggcaaagtgacccgaccctacaagatggcagaagtatctaattccaaggtcacagaggtctgtccgctagcgaatctccttgtaagacacgatggaaacgagctgatgttggcccgcttcttctagtccgaattccgtcgatggcaattgaccatggacaccgatgacgttgcacttcccttccgttctgacgtggaagagaaagctgtcaagctgagcgagttcaagcaccggaacgttacggatgtacgtcgcaaccttgccatctgggcatactttgtagctgacagttgacccatcttattgccgtacgcaatgataggaggagatacaagctcgtctatcagctatgcagagaatgggagcagggccagccaatgatagggaagaagagatcttgaagagcgaacttagtctggcgcagcggagacatgacaccgaggccgcgaaagcgctgcaggcgcaactggtcgatctgcagagcgtacgaatcgcgcaagagcagggcaaaatatcgagcgacactaccaccgatatgcttgccaaagtcaacgagcgaagcaagcgaatcgtccaggatgcgcacaagagggcgttcaagattgagacggagagaaaacggttggcattgggtgacttcaagttgcgccggtaagtcgtgtcgttgtaacctaacatcgattccaccgctcattaatacctgctaccctgaaagtggattggacacaccctcaccaagaggtagtcccgccccgaatcaggcgggcgcttctagtacgcctgtggacgtgacgaagaatgaacaagccaaggtcacagaaacaacaacgggagatgtagcagttgagctggatctgggtgacttctgaacccgtacttccgaatgtattttcgggcagtgcgtcttttgattccagttcggggcatgttacacctcagttttaccatcatgcattgtgtggatcgctcctgcgtctgcgcaatcgaacgcgagtcagtcgcattctgcaattctactgtggtacagctcgccatctcccagggtttcaagggcggagtgcccaatttcaggcctagggcttctgtgacctattgatccaattcggatatatccctccaacctgtgttagattggattgatggcctgccagactcgtttatcatcgggcaagcgtcttcctcacccttcgaagggatctgcgatcgttcctcacggaagagtggaactctgtccttatcatcgagctcgatcgcgacagaaaacagccgaaagccaatacttgagaacggcaacaaactaatatatattgttgtgcccatgttcaaacatctaataacgattagcccgttgagctccgttggtagagcagccgactcttaatcggcaggtcgtgggttcgatccccacaatgggctttctttttgccctttatgcgcgtgttttggctctcttacttgtccgttgcgcatggggggggtggcgtaaagatcaattcatcgcaacacacggtatgacatgtgtgtggcaggcaacgacgggctactgtcttgtagcttgtagatcatataaattcgcatgctgtgtgactagagagatcccgttgaacctaaagccttttttgctaggatgactgcgaatctctttcacgtatgtcggcacatcgctccgtatatcgcgcctgctggcacctatcatgatgactcgacgctacgacgggaaggctgacaggtcatcaaagggcaaatatgtaatggacgaagttggcacccttggtgctagtatctgcttatcatgatcgcctggcgattggggctcctgcccgcacgtgtcccacccaaatgacgccatcagtcaggccggaaccctactcggccactgcgaagccgctaggtatgggtagcggactattgaggtatcgacgaaggtgtcaccaaacgcaacccattacgatcgtagaaagtacgccagtccatagtcgtccgttgcaagcgctgcaacagatgtttcatttccgtcggcttccgtactgaccgtattgttttcctgtatcaacgagtccctgtgcacgcacctatgattgttcgttctcagtggaacccattccccggaattgctccttgctcttggtacgcgctacattattgtcagaatggttacgcatcctggaggctgcagattgcttgtatgtgcagacaatcacctgcgcaggtgatatcatcacgatgcaggaaacgcaactataacctggatggttgggtaagagcagaagcaaaggggtaagaggggagtctcagtgacgactacgacgtgatccttcaaacagatcccggcttcgtccagtggaatcggacgtcctttcacaagtgcgaacttagccacaggtaagaggggctagctcttcttagcaacctggagtttccacaaagcatgggcacatacttgagaatctcatgtacgaatctcatgtacgaatctcatgtgcgaatctcatgtgcgaatctcatgtgcgaatctcatgtgcgaatctcatgtgcgaatctcatgtgcgaatctcatgtgcgaatctcatgtgcgaatctcatgtgcgaatctcatgtgcggatctcatgtgcgaatctcatgtgcgaatctcatgtgcgaatctcatgtgcgaatctcatgtgcggatctcatgtgcgaatgcaatttgcttagcgtagaactgcaagctcttttcgaaggtgttccgcgttggaaggatgaacgcatgctcacacagctctctcaggccgatctacgtgtttacgtgcaacgccgattttcctctttctacaaagatgtctagacacctacgcggggtaagattgccacttggggtgggatcggataactctcgcgcgaagcagtgtcgactggatcttatcgaacgggtagggacaacttgtttctccccgaaggacgagggtagatacaagtcaggcccatcctgaaaactcgttcgacggaacgagtcgggatggagcgcacatggaggaacgtatcgactgccaagaccactccacgatcggtgtgcagtctcacccgccccggcgcagacggtgtactctcttgttcattcatgtcattgctatcgtcctcgaatctacaaacacattgcttaatacacacgcttggcaggagggacgctgtgaggcatcgcatgggatcagtaaaatcgcaccagtctgagctaaaccgcatacgatcgtcgttactcacgccttgcagtcgttctcgtccatggtcgtaccaatgaccttcctgtagctcaagtcgatgtcgggcttggtgatatctcggtggaaggtcaaactgtgcttcatccattcctcgtcgtcacggtcggggaagtcctctctgtgagatgcaaggtgtcgcgtcaggagcgaggccgatagtctcgattgcgagtctatactgaccgtgcgtgggcacctcgagattcctttcttgcggcggcggatacctatgaagcgaagacacgagggttggcaactgatactgacgcagcattgtggttcggtgcgcgacgtacgatggtctggtgagcgttggtcaacaagttggacaactcccaagtctcgaccaaatcagagttccagatcatggatcggtctagcgtatcgagagggcaagggcgagtcagaaaatcggtcgactggcaacgaacaacaagttcaatcggacgacgcctcgaactcacccttgattccgacattgtcgtacgatcggtaaacgtcggccatcttttcgactccctcgtccaacgacttttgcgttcggaacacggcggcgtcgctctacaacggcaagaatcgagacgacccgggatgatcagcacccggagtgtcgtccgcgccgatacgcctgacccggcccggatcaagactcacctgcatggccttttgcatgttcaacctgatctccgaggtgtgcaaaggtccgctcgagtttcggagtcggtccaactcggcgatactggcctttccgagatcctcgaggggcttgtggggcgtgttgggcttgtggttctccttgatgtggttggcggcggcccgaccaaagacgacaatgtcgagcaacgagttggcacccaatcggttggctccgtggacggaagcgcaactggcttcaccggcggcgtagagacccttgacgatctggtccttgccctccttgtcgacggtgacgacctctccggtgtatcgggtggggatacctcccatgctgtgaacagatccgacgtgggaaacccgtcagaatcgcctgatccgcgcgtacacgtcttctgggcgctcgagaggcaagggggcacaggctttccacccccacctcgcttctttttgctctcggccaccatttccgcacgaaccgcgcaatcggggcacaaccacgtgccctcgggaggtcgatcgagcaagagacacgagaggtggaactgccaatgtcgagtcgggtcggatcgagtcgtccgaggtgtaccatcgacgtcgagaaagagatgaataatgaggtcgtcgtcgccgtcgttgtcgttagcgtccgtccaagtcccccgacctggcgcgaaatgactcacccattcgtacgcacacgcatcgtcgtcgcacccgatcatctccccgaaactcgtcttttggcagtaacagtacaacctcgtatccgcctcgccgtcgacgtcgccagtatcatccccgtccaattccccatcgacgtccatctcacccggagcgtccccgacggcttgtgcgtgggcatgtcgaccgccaggaccaccggtagtgttcgtcccagcacccccacgttgaccgtaatattcgtgtgcgtacgcatcttgacccgtcccacccgattggacagaggtcgatccggcggttttggcagtagacgtctttttcctcccacccccgccggtcccacccgcagaccccgagccgggaccggtcgtcgacgtaccaccttgacctggtttgaattcttgtgctgcagccgctgccgaagctgctgcagcggcagtcttcttacctgccccacctgcacctccagatttctttttactcccccccgcacccgtcttgagagactctgcaccggctgtcgaaccgggcaagacgctccctcccctcacgctccccgagacgctgggagagtttcgttgtttaccagcaccagcaccaccaccaccaatcgtcgtcgcttgcagatgagccgggtagtcggcgtatcctccgagtccagcgtaagggtctccaccgccagctcggttgggttcaccgttgaacgcgttttgagagcgcgggttgctatatatatcaaacgcgaacaaagggtcgaagatcgaaatagcgtcgacatgtcagttgtcgacccaggagggggtcccgtccaccgccccattgaaatgacaactagactcacccgtcccaacgtttcgtcgcagtggtcttgcccgacccggtgtctgcccagaactcatctccctgtccaggctgacccgtgacctttttctccttggttcctcctcccgcctgcccagctccggccgtagcggcagcaccccccgtcttgcgtcgtttcttactaggcgtctctgatccgggtggttgtccacccgtaccctgtccgccgtaagaagacgcgtgatagttctgcccagcgttcccacccgcacccgacccgttgggatgcccatgagatcccgaattcgattgagatcctcccccggggaggagatgcgcaggggtcgtattcaccaggttcgcgtaccggctaggcatgggagagtttcgatgtcgtttcccacccgccgtccccgttgtcgcaccttgaccagtacccgccccggctcgatcttgcgcaggagcgtaacccgaatgagcttgacccgggtgggacgagccggggtaagtagggagtaagagggtcgaattggataacaaggacgcgatgtgggattgatgttggatcacctggtagtcgcgggcaacgtcgtcaattagtatagattcccctcaaagtttgacccaggcgtcggtcaacgtacatgatcacaagcgctccccgcgaccttgaccttgtcctcgacaccgaccttgaaacgagagagttcttcggcgatctcgagtaggatctggaacctgtcccaaggttggtccatcgttggggtcgcgtcgtccgtggtggaaggtacagcagtggtcgcagggatggggtcgtccgcaggggcagcggtgctaggctcagggatgacggcaggggtaatgggttctgcttctttattagacacgttgtcgatagttggagtggagtctccgttgatgatggtcgtctcgacttcgctatcgatgacgacggggacggggacttggtcgattttcatgggttcctctgtcaaggccgtccctgccgtaccagactcgagaccaccgatcgatcggttccgaaggtgagaagacgaggaagaggcgacattaatggaggaggctttctggaggatctgggtgagggtctctagtcgacctgtcaggtggaccgtagtggctacgacagcgatcccacccccaaaagacgcagaatcagcttcgcgttccctcatcacccgtcatgttcaccccgtgattaccctccaggctggacttaccgttcaacacagcgtcgagttccctgagatctccgaacctctgagtgagctccccagggatagagtcgagggtatcgagcatgtccatgacgcagagaacatcgtgatcgtcgttgatctcggtcgggatgacgggcgagggaggtgcgaggatcgggtaggctttgggtggcatgacgagggggatctgcggcgctattctccctatgacatccgagagactgcaggggcagactggttgggtgttgggactagcaggttggtctggagattacacgagtgtgtgatccatgttcatacatgtccaggtcgttgaagctatcggcaacaaagccgaaggatcgaatcgagagggggcgacgcgtaagatggtgggtgagagagacaaggtggtgacatggtggacgatatcgatggaatgacacggataagatacatgctaggcaggctacgaggaggacatgacagaggaatagtagtgatggtggatacagggtattttgcggcgaggaaaaccgagaggtagacgagaaaagaacgtcgactccgacctcgactttacttgggaacctcgaggaaagcagcttgggcggatccataaagcacaccgagctcgagcaacgtatgactcgtctgtcgatacgccctctcgaccctactcacaccgggatggcccagatagactgtcgtgtgagagaggacattagcatgcctacgcctgcctcggtccgacccgccactcgacgactcacctcgaacgtcgctaaacagctcttgcgcttcaagacgacgcactcgttcatccatcttgacggtcaattctctcggggccgccgaaacgtcctcgtaagccatcaacgcaaacacgttcaaaccctcttgcacctccttctcggtcgacccggcgtgttcagcgtgaatatgttgaccggcggctaacaacctcgtcagtcgatccttgggtttgaaaccctgctgatgctccttgccatagaaaaactcgaacgtctcgtcggacgggcggggatcgtcttgctcctcgtgccctacccgtcggaacaagctgtagaaatgctgcaacctgcatcggaacgcccagatcccgcgtttgtactcggcgaggaaacccgggtcgaccagagcgacaagatcggccgacgtgggcgagcaagacaagaggtgcgaggcgacttgttggatgtcacctcgagcgtaggcgtccctgcacgatttcaagcgggtccacatcttttcctcttcagacgtttcctccccatggaccttgtccatatcctcgtcatcccctcccgcggtaggaccagtcgactcggtgtcatcggtgcgacgacggtgcaagaccttttccatccccttggccgcctcaaagtaacccgcgcctttgaggtattcgagcacggacgaggtgagcgaggtatcgatatccctgataggttttcgacgggtcaccggcgcctcggtacaatcgtcacacgtatgcacctggtccgccagggtcgtgcgagtcccgtccgacgtgattttcgccgacgtgaccttgtcctcggaagactgttgcgccgtgggggtcgagttcccgcccgcgcgagtgccggtctgcatctccacatcctcggtcgcctgcgcccgggtgacgggtcgaggcaagtgcatgtacaccgggctcgccttgacctcggcttggactcggtcccgggtgcgctgaacgtgggagacaatatcgtacctgaagggtccggtgaaattgaccaagagtttttcgctgcaaaggtcgagtggcgacgatcagtcgtctggtctagtctcgtttgtctgatctcatcccatcgcatggcgtgctcaccccggtgtcctcaatccgacggcagggtacaacctgcccttgtcctgtaacgacccgaaagcctcgccgatgaacctcgagtttttggtaaagaacgccttgcccgtcgtgaaatcgatcccacacccgatgatatcgcccgtcgtgctcgtaggccaaccccggttgatcccttccccccgactctcaaagatgtagctgtggaaagcacaatgaggcgtcagtcagcatgaacagcaacaacaacaaaaaagacgtggacccggacgtacccgtcgtccatatgccacgcccagctctccctttcccagccgaccaaccggttcagatcggtccaccggctgcaaaacccgatactgatatatccatcccgtcctttacttccaatctcgacctcgtagtaatagaccccacaggtggaagggatcgggtgattcgccctgacggcactggcatcgggatccccacgctcacctgtcccgacataacagaccgccagcaagggatcttgcaaggggacgttgggtggcggggcggacaggtccggggtgagcaggagtcgagcggcacagtcggcccgattgagcgaggtgggaatggctcggatgggcaaggtggagaaccgcatgtattccggcagtttggatggaggaattcgggagatcgggtgggtcatgctcgacgggatccaggtgtaggcgtttttggcagacgggtcgagtttacgacgtttgacggatttagtacgactcaattgtcggcccgccgtcggtacgatctcggtcccggtcgaagaagagggaatggccgagacgtcaggtccgagatcggactgcccgttgaccgagaggattgtaggctggacgatacgcatctgaggattcccaccgacaatggcaggacggaaaatggtgaatcgcgtgttctcgtttgatcctggagctggtggaccccatatctcgaccatcccctcgggaagagcttgtccgacgtatggcgtgggaactgccccgatctgcacatgattgtgaccgagtgaagtctcgtcgtcgtcctgttcctctcgtcgatcttgctcgtcatcgggtgcatcctcatcctcctcctcctcgtcctcgtcttcctcgtcctcatcctcatcctcgtctacgtcgtcatcgtcatccccgggcctgctcccgacccataccgtccggaacgggttcctcagtgccaatgtcatcggatcttccccctcctctcccaatccctgatcctcgcctaagggcacagccgaccgcgtcctgatccggttcaacaagagatcgtacgcctctctgtgggcgacctctatacgctggacagcctcgtccgtctgatcaccctcggtgaaccgctcggccgtgctcgtcgtcgtggactgggtcggctcggcggggatcccaccgaacatcaaacgggggagtgagatggggctcgcgatttgtcgtcgccggctgcgaatagcgccattgccgaaacggatcccggggttgttcgtcaaagatgaagatgaagatgaggatgcagcagcggcagggttcggctcggggggcatgaaccgatgcaaagcagcgtcgaattcgtccaatgcgttcctcgtctccaatcggtggatgaaatcagcccgacccgtcggatcctccgtcgtcggtcccgcgaggttgacaaggtaatgcgtcgtctcctcgttcggaccgacaaagatcgttcccggcatcgtattggaggtcgaggtcgaagtcgaggtcgcattgggatcctgatccgggttgccgctacctctgaggttcgagctctgaccccgggttacggtactggaaggaggtagctggatgaacgatcgagccatcccaggcccagaatccaccgggtgagagtgagagtgcgaccccgtggcaggacctggacctgctccgtcagcattgacctcgcctgagccttgttgcacagcaccgccgatcatcccctccccagccccttcaaggtcagccccgaggtgaatagcagcgaggtgcgtacggattcgggattgcatagaggaagccgagctctcatcccgaggtcgatcggccatgatcccgatttgtccgtccgggttcacgtctacgttcacgtcgccagtgatattgtcgtcgtttgttcgagctggaggtggtcgtccacgctcaacgatggaagcggtcaaagaggctccttgaccagattgacgagaaacccgtggtccacctcgtccctgttgaagctgagtacgaggatgatagggtcgataagatccgtggtcgatagtccccgtcgttctcaatccgttccccgtcgtccctgcgagtcggatcgaggtggtatgggtgcggggatcggatgggtcacctcgagctccccgggtggaagaggtcggtcgggggaggtggtgctgacgttgatggaggagcagatggtggtggtggtgatggtgatggttggacgagttgatcgagggtgcgaggtcgataggatgagaactacctggacctagttgaacgggagcgtcgtcgtcgtcgtcagcgtgtcccgggttgtcgtgcgaggaagtggtggtcgtggtgatagtgatctcgtcctgtcgatcgggtctatcactctcgccggggatattagatggcatcgttcgagcgatcgggatcctggagaagcagagtacaagaaataacggacaagtcaaggtcgatctggacttgaaatttccatattctcatatcatttcggtcatatctctcagctctagatcgagtggcggccgggttgaatgacatcgagacgagtcgctcggaccggcatcatcccataatttacaatggaagagatcatggtatcatgaagacctgcagttccatactccatgctatcgacatctgaatcgaggcgagatgacggttcggactgagatgggagaagaaaggatgtactcacctacgaaatcacctgaaatctggtctgacagggcaagggcaagcaaggctctaacgaaagccgccatccatccatccatccatccatccatccatcgccactctccaccgtcttgaccggcgacaccacagtccattgccgttcgaccgaccattgtcatgatacttgtacctctatccaaacctgtcgggctgaacagcgaacccgcatctcggtatcgcatgagatgaatggtcgtgaacgacaaaactcggctgtccgtcattcccgacctcagggcggaccttggcacgataccgagattcggcatcgaccgatctcgtaacgatcccccaaccaaccaaccaaccaaccccccatacgacaccactccgtatgccattactagcttactctagccaactacctgttgatcacctggactcgagactctgacttggtagcacatggggggcgggcggggtaggtccatcgtcggtcgatccgatcgggcaagttacttttcggattgtccgaacgggaacaagcgcgtttcaccataaacacatgaccaaatgtagtcgagtcgagtagtcagggagataggggtagacaatttggtcagctcgtcgtcgtcgtcgtctctcgcccccagtcatatatagcaggtatatatactggcgaggatcaaggtgatgatgccgggagaccctccgttcatgtacttgctcgtcgatacataccaaaatcataaccgttcacataccacgacatcatcatcaccattgtcatccccaccatacccctaacccattccagatcgaataccaccaccaccaccacccctcatgtacaactctcccatcccactagacttgtacccaaacacctctttccccctcctcccagcttcaccgaccaccccgagtcagaccacgttcgaccgatcgaggacgatgaggtacccggacgagatggacctagggacttttatcgtggagaggtggaaacagctcggagtagggcacgtctttggagttcctggggatttcaacctgggtgtgagtcgggaggtctcgggaggtggtctgtaggtggggatagcaggaaagctgacgcgatacgcacggcttgatcatagttccttgactatatcgaagatgactcagagatcaactgggtaggaaccggtcagtaccaccatgacgatcaaatgacactacgaccatcctaaatgtactctgggatttgatgcgaacacagcgagcgaattgggtgcagggtacgctacggacgggtacgctcgagtgagacgtgacctaggagtgctcgtcagtaagtccgacccttcgcctcggctcgatcccgatcctcccggcccttccaaccgtttcaccgaccagcaatgaccgagtggaagctaataccatgtctcccccgcccgctttttagcaacgtacggagtaggagagacgtccacgttcaatcccatctgtggcatgcaatccgaacgtatcccatgcctacacctcgtcggcctaccttccacccacgccatggtcggagaagggaaattgttgcaccatacccttggagatcgacggatgagagttttcgagagcatgagcaaggaggtctccggggaagaggggacgggggttattggactcggagaggaaggctggacggacactgtcgatcgcgtgatcagggtcgcgttgaaagaggtgggtatcggtgtgcgtgatcgaagcttcgcgggatgatggagctgatggatagctctccctgagggatggtagcgacgaccagtttacctcggtctgcctcaagacctggtatcgaggaaagtatccagccaacccctctacacgtccctcgtgcgtcatcgtctcgccgttacaaaccgtcgtccccgctcacccagtctgaccaagtacagagagagcccgtgaccactactatgaccaccgtggccgacgaggaaaaagtcaacgagctggcccagtcgatcgtcaacaaactccggtcggtcagaagacccgtaatcgtcggtgacttttacgcgcagaggttcgggttcggggaagaggtcagagagttgtgtagagctttgggcgtcaggtatttcggaagtgagtttcgtagtcgggcggggaggatcggtcaacaaggatattgacgctaatcaattcgactcgcgtagcacatctggccaagtaagtggaggaccgcattgcaaaacgctgacgtcgcaatgtcatgctgaagcccgtctatttgctttttttcggtagagggatgatggacgagcaggaccgcatgtacggaggcatctacgcgggcaagatgacggatcaactcgctaaagaagaggtcgagagtgcagacatgtgtctgatcatcggaaggatggacagcgatctcaagtgggtggtcctgaaactcgactcgatgcagactcacgccgagactgatgtcgattttcacagtaccggaatgttttcctccaaattccccgccgacgtaagtacggccgcgcatgtctgactcatttgcagatatcctgacctttgtgcgaacgcgacagaccgtctccatcaacctggaagacaccctcgttgacggccacgtccacgatggaatcggcatgagcacgctcttgtccaagatgacggccatggctcggtcatctacatccaccgtatgggacgacaagatcatgtttgagccacgctcctcgatggaggagtctggaatgatcgtcgagggtgacaagctcaatcacgaacggttctggggcaggatggaaaaggtcagcaagggatgctctcggcttgtcgagcgcgtatcgtgctaatcgcatcacctctcatatcagtttttccgagacgatggtcggtgccgtcttacaaatggagtcatatgcataaactgacagacctcactatgcgatagacgtcatcttcagtgacgtgggcaccagctcgatgggtctagtcaacgtcaaggtgcccaaccgcgcgaccgttcacttccagcacctatggggtcagttgagatcgggcgcgatcagaccttgatccttactaaccaggctctttctactagcgagtatcggatggagtggaggagcggtcctcggcggagcagtgagtgtcgttcgtactatagcgcaggctagcgcacgctgacggtgagacctcatttccagcttgcagcacgagagcgctcagattccaacggcaacccacctcgaacgatcgtcttcatcggtatgtacaggcatcgtgaagcccccttgtaaatctcgctgagattagcgtatgtcattccgccaggcgacggcgcgctacagatgacgttgcaggagattggcagcatcatccgaaaccgacttcctgtctacttcttcatcaacaacaacaacgggtatgtcacgctttttcgagtcggccatacctagcaacactaacgattgtggcgattagatacgagattgagcgacaaattcacggaccgaatgccaagtacaacgacattcaaacgtacgaccaccatctcatgatccgcgcgcttgccggacccctctatgtgagcgcgaaccagagtgtttggttgcagacgatcgagtctgactgggtgcgtttcataggacgagctgtgtatcacgcacaaggtcaaaacccaagtagagctggacacgctgttgacggatcccgaattccacacgccggggaaattcaggatgatcgaattctgcttgcctcagtacgtacaaggccgcaggctaccttacggcgggttactgatttcgtcccgttacatttgcaggggtgatgctcctcgagccctcaaacttctgcaagggggagtgagtccatacgatagtctcagttccgcacggaagtcgtcgagctgacccgcccacccgtttcttctcgatctcagttcaacgttcccgaccgagtcaaagtcaaggccccctcgagaccgatgacacccgttgccactcgtattccctcccgtccgagcacgcctgtcagtgctttgaggaaggaacgcccgatcggcccttttacaccggaacctaggggtatggcgttttgatgcagctgctatcgtctagttgtatgagtataccaaggactttgtaagggtttatccaaggcagtgatcggtcgtagcatttggagatagtgactaggaggatacaataatatatgttgagcacagtcgatgcgcttcagcccccggcttgccggctgagcctgcgatccagctcgaagacgatcctgagatcaaggtggtggccacggtggcgatagtttggagcgggcaaaaatgtgaatccgtcggggaaggccgggctcgcgcgttttgcgcagccacaaagttatagcccttgcatctagtaccgggtcgagggcgtggtgtgcttgccgataacccaccacgaatggatgataccggggatccatgcgaggaagcagaggaggatattgatcaagagttgacctccgcagcctatgaacatcaaaaggtcgcgaagcggacatgtttagtaggtgactaggcgcagcgtgtgtggccgacttcgacttaccggctttgagaaacacgggaacgggaggcaacaagatggctgtggcggggaagaatggataagatcagtcatgcgcagtaacaatcagtccgaattattcagcccagcttgcccaggagataaaggagcatatccgaggaagacgacttgacgctcgacatgatggtcaataaaaaaatatctgggcggtgtttcggtagagttgtttgcgaataagatgcttggtgttttcagtcgagccataagagtaaaccaccaccggccctcatctgccttttctatatatgctcttatgctttcgaaggtcggcaactagagtcaacgaagcaagccgaacctatggacatttttcgactttcagagcttcgtcatctagttccgagctgcgaggcttggcaaaaccgtccacgtcactttattgcttcccggtcatatgacatattgcacagcactttttcgtctaacccgttcctacaaaaacaatcgctcatcgacccgtatgttactcccattcctctgggctagggactacagcctggcagcgatcagagacttgaccttggccgggtcgaggacgctctccgggtacgcgagacccggcaacctgacatgatgttcaccaccatcgacgacctgatcaaaaaaggtaccgaatcgtcagctcgactgcggagccgaatcaaaacaggtgacgaccaggaacggcggaaggatactgcgacgttgaatctcggctgcgaagttcgatactgagaccctcgcagatcttttgcgacgggattgccgagcgagagatgccggaatgggactggtacttacaaagatttgacccgtgatccaagtcgcagcttcggaaaacaagaacattcccatcgttgcaatctcgtctgttccggcagagattgacgatgagccatcatctttgcccttgtgacccttcgaaaacactcacctccgtctcccattcgaccgaggggtaccgcctcgacgctcttgtctcccttaggcgagagcctctccataccgggcgtacccccgataggacctgaacaatcacaatagaaccgctgtagtcgtcagcaaaacgatcttgtcgtggtccgagcctgaatcgtaccaggagcgatcacgttgcttcggactccatgaggaccctcttcgacggcgaggacttgggaaagcgcgtccactcccgccttggccgcagatacatgagcttggtaaggaaggcctagagatggagcgcaacatgtcaatctgtcagccacttatctgaggtcgatgcctgtgcgaaaggggaaggaaggcgggactcgcctcggtagtgcaaggtagcagaaatatggatgtaagaccctcgtgattgtctcacataggggatggtcgccttgatcgtattgtaagttccgagctgttggtatggttataaaggctaccttcaatccacaagcctgaaaagggtgaaaggggtcttgacgggacgtatggctcaccaaatcgatgtcgataaccgtcttgaaggcgttctccgaaagaccgctgataggagccaggctgagatattcatcgactattagaccacacgagtcccgcttttgggcacgatcgttctcacaagtttccagcagcacctgatcggcgggttgaataggcgccggtcaatcgtcagatttcctgtggaatcgatcgctgcacgtaccgcaaatgacaaagtctagcttgccgaacttgtcgatacatgccttggcagcagccttgagatcttctggctttcgaacatctgcctgtacaggcaagcatgtcctcccggtctctttagacaattgctcggctgctttggcgttctctggtccactacgaacgtcgactgagcatcagctgaccttctcatgactgtccgccagaaaggctttcggggcctcactttcgaccgagaatgacactatcggctccgtgcttcatcatcatccggatcatcttgtttacgataccacttcgacctccggtggatagcacgaccttgcccttgaagaggtccttttgaaaggtctgctcgctgggaggagcagcaggtcggatataacgttgagccatggtaaacggatcgagaagtaatgtggtgcttgatagaggttcaggactggagagaagtgaaaggtgcgaagcgttcaggacatcaatagaggatggatgcgatggtcattacgattggacgtcatgcgacatgatgatgtactgtatggagaccgaggtggttcggaagcaaattgaagatgatccggttaccaccatcacgggagcataaccggtaaacacgcgtcaggtgaccgaacccgctttgatcggtttgtttgataagtagaagcatgacacgtcatccatcttttgggaagaacagatgacgctttcgttaggtaacgaggtgctggttggtcactgtcgagacagtcatcttcctctaataacgatctggcgtctcgcttgcaggacaaaaggcttggaaggatccaccatccgtacagacccggcggaaggttatcaaaccttgtcgttcgaaaagaaggatcttgagaccgggacggacgtaacgtctcttctggcatacgtagaccgccgaatatacaaagaaggtttccatctcgacacgctacgggatctctctgccgtgattattctccgagacgtcgttcagggccgcctgaatcatgtaaagatgcgagttaaggttcaaccgatagcatgccaaagacaagcgaggttgttacgttttatcgatgcataacgccgaaccgatagtgacagttgtaacaccgtgacccgactctgttgaagcgcaagagtgcaactactacattccgaattatcgacaccgactgcgagagcgtctatcagatgatgatcggtcagccaggtcatgaaagccttgtcaggattggcaacgaaaccctcgttcctcgtcgtggtaaacaatgggtatatgatgtacccatggtccagacggtgtgatagggtccgaacccctctcgacttccgtcgattagaggacgggatgtgtcacgagtcgatcgatatggctttgtggcgttggtatcggggcaatactggatgtgatggggggttcagcgtgtactaccgagcatatgttcgagctttcttcggtatcaaggtcgagttagtgctcgcagcagcgatgaactatgattcatgcgcacgcttcccagattcgatcagatacagaacctgtacatcgtaaacatgtcatcatcatggtatcgtcgtcgccacctacgccaacaatagcccgcaaaacggggcctgctcccccgcaaacacaagatagcgcccaagggacgattttagctcgcgtcgatcatcttgtctcgtgggtagagtagtttccggaagagacacgttgtgcaggtttatcgtgggacttaatcactaactccggaggaagcttttcgtattgctgacgaggactgtaccatagcgcagggctcagcgaggagtatggccagcatgatcaataatttgcattttgattgtcttcatcagcgagcggcgcttcgcaccgcattcgcaaggtctcgaaaggcgataggccatttcggcgtgcgacgatggtggatggtcaatcacaagagccgaccgacatctgcgaatgcgaatgcgtaatttgggagatctgaatcagctgcagattcaagcatcgattggattgaaatgttgtggaccgtcaaccctgcaacctatcgaggttgttccgacaccacgttatccctctcgcttggaagctgtctctcgcttatatgcacgcgaccatgatcgagatcttctagaacatttcgatcgcgtggctggcttttccaagcgaggtaccgcaagtggcgtggaagcaacagttgtcgcagcaggaaatccagctttcatgtcacacggcacagggcagaccttggcctgaactctccggcctctccgaacgaccagttcaccgtttcgtacctgcttgctaatcacaggtcaattcgcttggtacctcgatcgatctggctcgtgaccatcgccagtcccgatcggactgacttttcaccaaaggcccatagcctatcgtgaatgcactgcgcaaacaaacggggtacggaaagctcatgtaagacacgctctgcacaaaccctcttttcctcgctaggaattactgatcgctcgcgccgccagtcgatcatcgaccacgctagcgagcgctccgagatttttcgttcagggtggatgtgacaaccccggccaggggagaaccgcccagttctttcattttttttactcccgctcgtggatactttgccccgatcgcgaccaacgtcgggtcgtctggcccggggcctcttcccccctgtgctctgcaccaccgcgagtttcccagcacccatgaaagatccgttcctcccgaagggatcgtcatgaacacgccccgcccttttacgctcaaaaaatagctaccgtccccgcaccctccttttccgaaccaacccactctcgcatgatcgagagcactgttctctctgggtatcatgcctttcccggaggacgacggtcgctcacgattgacacggaattcggggttgctgcaagatcccagggaatgaccagggtggagggcaaggcgttggtttcgaggggtgggtcatgggcggggaggcaatcacgacctcgggactctcgtcagatgtgatcgaagtagtgcccaaatttcgagtattcggacacacatgatgcagttgcaaaaagtgggaacgatcacctcgttatttttttccctacgtgcggcctcgctccgcctgtacgagagtctgcaatcgggtctggcaggtcttggactatatcatcatcacaccgagaggacagctcgagcgtccttccgacagtcgagcgtttgaccctgtccaaaccacacacggcattcgtctcgtactcggcccgcttgagaatattgctccctttccttccgcccgtcggtcgtcccctcgccgaccgaagtcttcccacacctcgtcccagcacggacggtgtttccggtctcgtgagacctctatctattaacgtttaccgaaaggacgggcggctgcccttttcgttcgttcggtcggtgcaggacgggatcagcttttcgacgattcacccagccgccttcgagtaaccttctatcaccgtccctggaccctggacagcaacagtctcagagctggatcccccgagagtccgggcgataaaggtctgcagacgcatagatctgtcagggacggatcgttcgagggctgaaagcttgaacagacggtcatcatctcgggaccgtaaacctcgatcgaccctggggtaacagcttcgacatcattcatcatcatcatcttcaaagtgcctacagtagcagctgcttcaggcgaggtggcatatcaccgaatttgacagcatctccggtttgacaatcatcggctccagcaacggcagagctagcgatatagactctcttaggtcgaacacgggacgggattaagccggaccacctcctcctaggttgaaacggacaaacgtgtcaggatcacgagaccagtaatcaagcgaaccaagcttcgtgcggttcatctctcccctgactttgcgtcaaacaggcaagaggtgttctcgattcgagcaaggcttcgagcagagttggaccgtcttgcatcatcaaggggtcggtcagttccgcgttaccggtgagtccggcgattcgacgtgagactcgtcgcgggcgaagaatcacatcaaggaggaacgtaaaggctgatcgtttcatcatctcgtgcgtttcgaactttcttcctctacgttctacccgaactttatcaacctcgatcaaatctgggacatctctgatcgccgctccatcgtggtgcatggtggtgactgctcggccacgctgggaaatagaagtctcttctgtcgccccgcggatatctttgaaacgcgatcgcaatcgttaccggttcagcaggaaagggccaacacggtgaataccccgaattggaaggtcctttgacgacaacgactaccccgtgatcggttgatcgatccattagctgtcacgctgctccgggtttgatcaaacctccacaccgaccggtccactccacgcgcttctcgcaaagagggtctaagcgtttcgaatccgtgttcatcaagagagcgggaacgaggtccttctgttctttctatccgagtgttccaccgatcgcagcacgagggcgcaagggagtaatcgacgacggcggggcaactttatctgatcgaatcgtcctcttcctttggcgttcccctgctcggcaatcgattctttgatcgaccgagatccacctgcctctcaagccaggacgtgatcgatagagttcgtcaacgtttggggaatagcaatataacctcggacgacacgaggctgacgacatcgcactacgttcatctacatctcttcccgtcatttaggattttaaactctagacatctctaggtcgacgaggcaacccttgtgcgcggccatatgtcaggaagacggggtacagtcggcacatcattatcatcatcatcatcgtcatcaccatcatcacgacatcaccatcaagacgatcgttggccgacattgacgcgcaacagctcgcaaagtggccatcgactcgacttacactactacattatcagtccacgcaaccacgggcagataaactctgtacgggagtcgctcgcttcgagcctttgatcagctcgacagcgggagaaaggcttcacggggaagcaaggcaatgtcgagcatcacccacgcaggcgtcccatctttacaaccttatcgaccacctccattgaacctcgttcaggctcttccgccaccgcaaccagcaccaccacctttgagttcgtcgaccggtatgacgtttgatatcaatagtgagtcgcaaattcagaagcctctctcttgtcacaatgatggggaaagctgatcatgccatggacgtcttttccatctttcatcagaccccaccacgttctcggttcacccatctcaagtcccgccgttgacttatcaaacacctttacaaacacaccgcacgccgtcgttgggcgaactgcaacacccgcagcatcatcatcagcagcagcctcatctccatcaccagcaaccattatcgcaacatccacagacaacaccgacttttcgtccggcggatgaaccgctcaagaaacgtcagaggctgcactatgatcaaccccagcacgacatttatccgagggatggtgccgtgctccatcaaacgaattccgcggtcacggtgaccacgcccaggttctcagagacacagcacgatgatcagatggcgctccaaccgtcttcgacacacgcgcaagggtccgctccgttgtcggcggtataccctaatagcctccaaccgaccgtttcgtccaactcgaacgctacgagcaatacggagcaagggtattaccggggtgactatccggaccaagcgggcatggacgttcagcctgggattgcgacatggggaagatcccccgtcacctcgaaacggaacgtatccctaggtggaacggacgcgcgaggtctctcacagcagcagcagcagaccccacgcttgccaccgcctaattcgtttgtctacccgggacaaggaagtgggaacgcaagtgcgatctcgggcgcctacccgtctcatatccctcatctcaaccaacccgtaacgctgccttcgccagttttcggatccatcgcgcagattcaggtgcaacagcagcaatacccggatcagtacgtgggagtacagggcgggcaggctggatatggagagaggtacaaccaggatcatcagctgtcgaactctgaaccgtcggtacacaacggaccgggcggaggagccgggtattattcggcaggatatgcagctcaacacttttcaccgatcgtaccaccgcgaccacctccacctcataccgcgtctgcgcacctcagcgtgccaggagccagaccgatttattctccggcgtatggttcagcaggttcgacaggttcctccagtcagccgggaagctggacagacacgaccgggcagtatgcgatggtcaacccgtccggacatgcctacgccgacacggcaccaggatcgtacagagggatgatgccgagtccagagaccaggtttacttacctcccaccgggtccaccgggacggggactgccaggcacgatggaatctatagaggagagaaggaggagcaagttttcctcggaatcgtcttccctggcttccccagtttatcactcgggatcctcctcgtatagaccgtatccgacacaacgacccgacatggaaaccgagtcgggatggtctgcagagccgtcctcttcaacgactaaaatgtccagcagtctcggcgctgaaggtggtccagcaggatccggatcggcttcgagcaaaggaaagagaaagatttcgggatccgcctcgggttcaggtggcaagagtcaaccggtctttgtcaccaaactattcaacatgctagaagatcctgcgatcgctaggtctgggttgttgaaatggtcgcaggacggcgcgggattcatctgtaccgatccgaccgagtttgctaggtgagtctcgtgacggtcagcgggtccatggtgaattacagacttactttgcccgactctgcggtcaggttggtactgcctcaattcttcaaacataacaattggcacagcttcgtgagacagctgaacatgtatgggtaagcatatcgaccattcgcactcacgccccaatcagcgctgacgctgatgtacggatgctgttggaacgccagtttcagtaaagtaagcatggtgagggatctgctccaccccaatatagcgcgctaactatactaaacgtcacgtctgttcgtgtctcgcccggctcacagcaagtcaacgatgtctttttgactctgacgacaccgtcgtcattgcccatggcttgggagttccgtcacgcgactttccgacgggacgatccagaaggaatcgcttccatcaagcgacgctcagtcaaacagaccaaccagctgagactgcagatggaagccgaagctgctgctcgtcaggcgggagctggatacgcccaaaatgcaggacccacagcgtatggagctggcaacgatcccttgatgggacagaggcccaacactacgagccccgcgctgtctaccatgtcaggtacatctcctcgttacggagcagttcggtacagtcatccggccgagatgaccggactcaacgggtacgccatgcacagcgcacctgcctatgtcagtgcgccgggagggcgatcggccccgggcggtttgccggcgccatacccttcggtttatcctcgatacactccgtacgcactgagttcagctggcacttacgatgcctatcgcctgcctccctcggccacgagctcccagtactatgctcaacctctttcgagcgcatcggcggtgtcgcaatacccaagcctccaacccgccggggaaccacccgtctatcagtcggtacccagttatgatccagatcgctccaccgttcatgcactggctcgacaggcgggttccatcagttctcaagcgcatcttctcgctcacgagcaggaggcactcaaacagaataccgaagaaatcaggcaagagacgggagtgatactcgacagcctctcgggtagtaccgatgcgaatcaagcacttccagactcgcggggtcagtaccacgataggttagacatcggcagcacgggctcacgctgtatctctccttgtctcctgacagcgtcccgcttgcgagaaggtatcgagaggttgcaggacaaggtcagcgagagggagaagcggctttcagccagtttggctagctctgagagtatagcagctcgcgcacatgctctgcagggcagtctcgctgcggccgcatcgacaacggcgttacccagtgatggtgagttggaccgtttactttatgcgccaggctctgtactcatacctatcgaaatctcaatcaggacgaggcatgcggcctgtcaactatggacccaactcgaatggctggccatccggttacgaaacgctcccccccttgcaacagccccattacgactcggacgaccaacaaacacgaaacccgtcgctcgatcagtgcaatatagacatgcacgtcaaagaggaaccttacaccagaacccaaaggtctggatcggccgataccgacgatcgatcggatcggtcgcacagcaggacacgaagcggcagcggttccggtggtatcaaggagcttttaaactaggatccacatcgtgtccacttgtagatatcagtacatatataccccatctactttgcattataacatacgcatctcgttacgaacatgaccacaattagagatgtaatgtgtttttgccacattgacttgctcttttgcctccacttttcgggaacttgagatcggcgatatctcgaaataatttggactggtagtggcccggtcaaccagcaaccagctagctagctgtctatctatcatcactttatgacgcatcagccgaggtcagcatagtcctacacagtcgagagcggcttcccactttatagcgtcggtcggaatcccaggaggtatggtcaaaaccctgacctcgtacacggggatctccagatgccttgcagcagcgacggcagccaagaccctcccggtcccgagagtgggtcgcaccataggccacacatcggcactgtgcatgtcgtccgggaccggcgctcgatggtcctaccgagccgacaccagcccatctcgccaatgcagacgaacctattcacaaccggtcaaggtagacgatgatagatatcaagcgacttatctcgagagcctcatgaccaaggccggcgaactgagtcttcgatgtgagcctgcaagattggtatggaacaccacatcaggaactaattacctcttgaacggcgacagtcaccatactggatgccgatggtaatttgacaacggaacaagggacagtgccgaaatcagatctgtgcaagcagcacgatctagacgtatgtcgtcatccctgtcgatctccaggaatggcgctcataccatgtactccctactctagccccgggacttgcgcaagctagattctctccagcctaacctggtacccacgatcctatcccgtcgatccgccatcatcgtcaacatgctgcacgttcgagcgctgatcaagggcgatatggtcatcctctttgaaccggcggggatgcgttcgaacaagctcagagataggctcttgtggcatatgcaagccaatatcaaggcgaggaggctgggagaaaagggacgagagcacgcacaggggaaagtcggcgagacgtatatcgagttcgcctcggagctcgaacgagatggacgagagagtatgctgcaggatggcaagcgattgagttacgagcatcggtgagtcctggtgatcattacctgaaagggactttgttacagcatctgatacgttcttgtccagtgtgcttgagagcattctggtgtcggtagctgtagcactggaagaagagatgaagtatactcggtgaggcgcgacttgatctcgtcgttactatgattgtggaccttgttgacgtccgaatcttgaacttgcagcgaggtcgtcaatgatctcctcgcagactttgagagcgatatcagtcgggataatctcaggcggttgctgcactattcccgccggatagctggatttcaaagtcgggcaaagtacgtgctcgggtctatcgaggaagtgctggaatctggtaagcaaagagtctgcgagatgggtcgtccatcggaccacgatagcgctgacgatacaactcgacagacgaagacttgtcggccatgtacctgtcggcaaagatggcacatcagccgagaggtcttacggatcacgaagagctggaattactgctcgaatcgttctcgaagcaagtcgaagagattgtcagcgagttggacacgttgaccgtaagcttgattcacccatccttgctcgtatcactgcaggcttgacgatctcgacgttgctgcagaccaacatgtccaccactcaggaagtcgccgagctgatccttgactcgaatcgtaacgcactgatcgcgatggatttaaagtaggtcttcgtgcacgaccaactcgtcaagcatgtctcacgctgacacgctggactggtggcagagtgtctatcgctaccctgggcatcggtgtcggcgctctcgcttcgggtgtctttggcatgaacgtgcgtgatctgcctccaggctgtgtgactccatttgattgacctggacgcactgttcctatagttgacgtctcacatcgagtcgcatcctctggccttttactttgtcactggcagtgccgtcatcgccgccctcgccaccaccgccctgggcttgcgccgccttaaactgcttcaacgagtcggaatcagcgctcaacgcaagaccccagccgaacgactggggacgcgaatatggtcaagggccaaatctcaacagcgagatggcgcgacgtcggagccggtgtatatcaataaagaggcagactctgctcgggctcgcgacgcatggcgtgccgagcaggcacgggcagcgaccaaaattgcggaagacaaaaagttgatcgcttccaggttcggaaaaggcgcagcactgtctctcggtagacgttgaagcatccgggagccactcggtcaagactcgtcaggttgtgcacacgcattcagatccaggtcagcaacgggaacaatcatgtatcaatcaccgacaacaccctcacgctagcatcagacaccaatttgtatatccatgtatagctctatcttgtcgttaacaatgacaccgcataccactcgattcccaccttcacttgtttcgctcctccagtcatttcatacggtcgttaaagtatcgtaactcacccgcgacgcctttttattgactctcgctcgcgaacgccatccccgattcccttcgtaaccatgcgacgtagctagccaggaaattgacttgctcaaacgtctctatcgccttgatgcttcttcgtcgtcgtatcaggcaaatcaccctctcgaccgtcgacatgactctcgcgttttcacagatcgcttcaacatcttgctcctgctcgattagttggctcaattgcaattcgaggtccggtagagatccagcaatgcccatcttgatggcccaggcgcatgcagtcagcccagcacgtccaacaccagcacgacaatgagccaagacatgaatgcctttgagggtaaagttgcgaatgaccttttccacgtggtcgtcgaacgttgtgagtgaggatggcgtaagaccctcgggcataggaatcctgttcaaagacgatatagataagttgctgcaggcggatatcacgaaagcatggacatcacttgcctcatgatgtgcagacctaattccaccgcccgagctcgatactcttcccatggagcacccagaaatctcaactcgttgtcatccaagcagctgatccgagtatggtcagaaagaacgctgctggtttggctcgagtcgtgaggacacaggacatccgactcaccaaacgatacagcctacgcccatttctttgatcctctgcaaatccaacttgaggtcgcgacagatggtcgcccttccccgcactggtccttccaatcggacttttttcccaggacaactgctgagcaggagatttccgatacccagattgatctgtggttgaggaatggctgtgatgggtattggagcgttcccaccgatttgattcgccatgacggttgattgccagacctcgtccgatgccgggaagagaagcggtttaccgtgcgatttgcttgaaagatcgcaagtcgtggcaaggtgattgaccaacattggcatggtatcgatcgggacgagcatcgacacgctgtggagatggagagcaaggtcagcgggcgttcgaatacagtgccgacatgggtcatcgtaaactcgcttgatcggatgagtatcgctagtcctaggcccggatcgcctgctgtcttgctcggattgcttgtgccctccagccatcgattggactgaagttccagttggattgccacgcatctcatcctccatcgcttgtttcaattccatctgtatcttttcatcccgagtctgaccgacggccgcgtcctttggcatgtccagatgttgcccgttcttgaattcaatctcgtccttttcgacgctcttgacagccataccttcgtatccttcttcttgctctatggattgtggaagcaggaccctcaggggagtctgatttgtgggattatgacgttgagcctcggtgtttggttgccgtgtcgtctcttcttcgttcgggccagacggatcgacatccttgacccaactcccgtccatcgatcgcgatgactgtttatccgtggggtggtcaaccgcgcctcgtggagcgccgggacgaccatccggttccgtcacggtctcgaacaatcggctttccccattgctggtcaaggcgccgtctcgctgactggtccgagaagtagcgaatgaagactcgctcgccgttgaagacgccagactgtcgtttccatacgcgtcctctgtagcatagacctcttgttcaaacattgcctgagccatcatgaccgagtgaacgtgttgcggggccgcgatagtgaggggacaataatgcatcggagcacctagtcgcatccgcgaaaaccaccttgtcagccgtcaccctgacctcgcccttccggccgagcgatcgcgagccgagactcacctctttcgccaaacttgagcttgttgtattcactcgcgtgccactgactacagagactactcagcccttcgcacgcatccaccagcatggcacgtctcgcttcctcctcggcggacgtggcgttgaatgcgtacatccgtcggggcggggcaaacgatctatgcatcgagccgtccaaaggaggctgtccgtaaggaggcggcggcggtctgctacgttcaagacgaccgttttcatgagtaggaagatgcgaatcggatttcgagccaaacgtgctggaagccgggactcgttcttgcgacggcccaggttctgaacgaggacgatcgggaagtcgacccggttgtctagcctgggccgtgccattggatctcgatggttcgattttcggaccttctccaggcgaaaccgagctagagccacggtcgacctcgcagtgatccctctttctggtgccatccgactcgacatgccgcggatccagcaaagccgagtcggaagcctggactgtcggtggcgagagggtggattttgaattcgggtacgaaaagtgcgaattcctctgaggggatccggacgagcggagtgagaatggtggggtctgcggaagaaccgcgttcggggaacggtcaggcgagcgtgagtttcgagaaggagagcaggaagctctcgggtgatggtgtttgcctttcaagctcaaggaaggtgtacgcggcggtcgtgcggtcgcttcaggaccttcggcgcattcccgacgtctcgtcacggccacatcaaacgattcccccgcggtcccgtcgaaaccagcctgatcttgctcagcctcttgtcgctcgagagagtttgtgacattgtgttgcctctccttgcgcctgtccttttccttttcccgcttttcagggctcttcatctggctctgacctttggtgctcgccaccaagctggaagagggtccgacggagcgtttgaacccggaagagcgatgaacggggtgcgaggtatgactggtggaggatgccgagtgggagctagagtgatgtgcatgatagtggtgatgattgtgaaagtggttgtggtaggcgggagagtggggtcgggaatgaaaagaggacgccacggtcgaggcagagccggcggacatgccggtgaaggttcacaagggtgccgagaccagatattcggttcctcaagttttcgatgcgattcgaggccaagatttagggggcaagagctttttgtaaggcgtccgtctcgactctaagggtcgttcgaccgggttgacggaggttgtcaaacaggccgtgtcttttcctcgtcgaagggacgcgtctactggggaggttcctgttccacaagaatcaaggtagacattctgatgggtacctggcaggcttgttgttgcgttccaagtcgagttggggacgagatcgagcggtgcccggtcgtcggcgtgtgtcgggggtgggtccttgttgattgagatagtggatgtccaccagagctgaaaggacgaacaagctagtacggctgccaggtcgagcgacttttgaggagcttggagttgatgtgctgtggactgtcgtgtcgaccggggtcacgggtgagtttacaggttcggtgtgagcagagtctgaacgaggacggcctacttgcctgatacgcccgccctcttgactgtggagttgctacggtgttgagacggtgcaatgatatccggtgactctttgatccttgtatctgaaactctctaccactttgctctatggaggttgtgcactgtctcccaattgtcgacgttactactgctacatcgctgctagatagatcaagagtgttgatggttgcccgacctcgacctcgacctcgacctcgacctcgacggtggcgaattcccaaattcaccggaatcaaattgggaaatttgattccgaaaaagcaaaagtactagaaatatactatacatggtcgacctgtaagaggtatcatacaatacaatacaatatgtgggcttggggaggggccaagagaagagacagagagaggcagaggcagagagagagacagagacagagagagagatgggaccagtgaccgggaaaccatacccctagatacctacgacttgtccatatcacccctcaaggatgaatcggctcgatcggtatcggtccagaacttcgggccatcgattcgcctcccatacagttgtatagcacgaacaccactaggcagtgctattaaccatcacacgattgccatcaactacatgcgaccgatgaaagtgacgtgtgacgagaggggggaagagctcaccaatgcagcgctatacatgatgaacaacgatcgcgctcgcttgttccctaccaccgctcgggtcagggcgaacacgctccgatcgaccgggttcaaggcagagatcgctcgttgcgcttcctatggacagcggggtgacagcaaacaaaaaggcacaagtcaggctcgcacacgtcctccttgaccccggtcgtcgtcgacaaactcactcgtcccttgaaagcctcgaacgggttgaggctctcgtcatacttgtcccgatatcgcccgagctctacatcgtccttgcctaacctcccaaacctacccccgttcagacccgccggacctgatcccgcggcgccgcctagcgagtatccagcggcggtcacccccgccccaccgcccgaattggaagacggaccggcactggcgttcgtccccgtgttggcgtacgattgcatgtaacgcaccttttcgtacagcttgagattgtcagactgaagcgtcttgatctcggctcgaagatcggcaagcccctcggactgtttacgtagttcctgcgggcgagtctcgtcgcggtgagctcgtcatcgacgcaaagggatacaccgcgggcgtctcgtctcgacttacctcttccaactcggaattgcgttggcggaatcgatctcgctggctggtcacgatgggcaacagcgagttggcgttattgtctcccgctccacctggggtagagtaccccgcacccagttgagcgttctggctcgaagggttgggcgaatcctaccaaattgccaacgagaggccttcagtgtcggcgacctcgctcgtgatcttgaacgaaactcacggccatcttcctgccacctagatctagacccgctagaccccgagatttggcaggcgtcgagacgcctccaccggcgctgcccgtatcgctaccttcttcatcgcctcccagaccggggctgctcgggaatccaccgttccaagcgctcccaccgccccattgactccctgcacccccgccaaacacgctcttgcccccggtgttgtccacccgcatgagatcgttctcgagcttttcgttgagcgtctttagcctcgccagatcaccctgcacgctgaacaatcgttcactcaggtcatcgttcagctgacccagctcttcgttgttcacccggagttcggtcaggtcttgctggagtcgcttgttcttgctcgccaacaggttctcaagcgatcggccgtgttgagcgttggccttgtcggcgttcgggtcgggtagacgcatggaatcgtcgtcctggtccatgtccccgccagaaaattcgacgtactactcgcgcagtagtagcaagttaagttcgagttcatgtcattccccccactcgaacgagacccgtaacccaccttcatgatctccaattcacgtttgatctcgtcgtaatcggcgtacagcttgaccttggccctggccgaatcgagctcgttcttgatcgtggtcaattctcgctcgatgtcgtctcgccgtttggacgactcgttctcgatccgttcgcgctcggatttggattgttcgagcgtgcgcaatagtcgagcgcactcggactcggcgtcggcgagctgagtctcaaggcgtttggtcctagcacgaagaagagccgacgtcgatggtcagaatgaccccggcacacaagacgcaaaaacggaccgcggacgcctcggctggactcacttttccaccccctcgctcccgctcctcacactttcgatctcactcctgagcatctcgttcctcctctccatcgcggctacccgctcgttggcccgtgccagatccgagacgaccatgtccacctcggcaagcttggccagggtgtcctgatcctgacgctggctagcattgacgagcttggcctgtgtggattcgttgctagcgtgcagatctttgagctggtcccgcatagaagagacttgtttctgaaggtccttttccctgcatgtcgggggtcgtcgtccgtggtcagcgtggtcgcggggtctagactcggagctcgacactcacctctgctcgtaattcttcatacgctcgtcatacttggcgttcagctcgttctccttttgctgaagcttttctccgatcaacccttccatcttgtcttccaacccttccgcccggctttcggctcgtttccgcttctcgtccacattggcaagatcggcaagcttgttcttcaactcgccgttctcgtctttgagacgcgagacctcggaggtgagcaggtcggcttgagcggctttgaccgtctgatccacggcagcgtcgagaagagggtaagggtcgggagcctcggcgagcaacttgtacacgtgcagaaaggccgtctcgctggacttggaacgacgggtgagagagtcgatctcggattggtaggctttcaaaagggtcttgatggcggagaatttatcattgtcgtccggcagcttcttgaactctgccaattggcaagttcatcgtcgtggaagagagcaaggagtggtgtcaatctgatcagctggaaagcatatcatgaatcatcgtctctctcgctcagcccaccgcacctcttgtctgctctgccagtttcttcctgccgaccaggttctccttttggttctcaaccaactcgagagccgtcttatccaactgtttctgcgtctctgcgagatcgatctctgtgtttcccggtcgatagggtcagacggtcagtgaggagaggtcaaggcgacaagacaacgccggccacggtctcacctttccatgtggccaaggccgaggagaaattggcttccaccgcagccatgatgatggggtttatttgctggtactaccttgacctcgactattcgttcgagaccgacgccgtcgatagtcgagagatgacgggattacacgactagagtgtcacaagtctgactactttgtggtggttcgagattggattccacgcttctacgacctctcgcgcgctaaagtggacaaggtcgaggaggacgacatgacctcggcaacgacattgacaacgacgacccaggctctctcgattctctcatgtatatatatttcgtagcaatgattggtagtatacgtgcaagtgtgcaagaaaaaaacaaacagatgaaacccatccctcctcttctcagtacgtttctcttcggcaccgtctctacttgacgttgaccaacttgatgtcaaagctcaaagtcgagttgggagggataccggggatcttttgggatccgtaagccaaagcagcggggatctacaggagtgggagattgtcgtcgtagtcatcgtcagtcgggctagacgttcacggatagcaagtgtcgactcacggtcaattttcgttcacctccgacggccatcccggcgactccctgatcccatcccttgatgacctctccagctcccaatcggaagttgaaaggcgcaccagcagtgttggcatcgaattgcttgccgttcaggagcttgccgatgtacctacgagtcgcgtcaagcagagcaaaggcgtcagaccgtcagccaccattgtccgtatcccgccgatcaagacggtgattccctctcgaaccctcacctcatgccacatcgcttgcccttcttggcaacggcaccgtcaccgatcttgacgtcctcgatgaccaacccgttggccaaagtcctcttcttgcttccctgctgctcgggcttggcggcagcggcagcgggagtctcctttttcttctcagtcttcttgtcggcggcgacggcggtgggctcgaccttttgcttcttgtcggcctttttggcggcgggcttttcggcactggcaggttcctcggccttgcgcttcttgctctcgggggtggcggcagcaggagcggcggcggcggcgatggcctttttgccgtccttcttcttaggagcctcgacgacctcttcgaatcggctgcggttggcggtgcaggtgcaggtcgtcgagtcagcaagacaaacacacgcggaaacgattcgcatcacgccactcacctagcatcggccttgccgttcttcctaccgacgaccttttcgaggtcaaccatgtcgatatcgctgtcctccatgtcgagctcggaatcctcctcgtcgtccgagtcgccgagagggtaaccgtccgaatcgtactccgagtccgagtcgaggtcgtcatagtcgtcacgtccgccgttgaaggggaactggtcgatgtagtttccgagcaagtggatggtgctagacgagcaggcacagacggtcagtccaggtcgagatggcaagagcaaagccatctttgagactcacttcttgccagtgttcttgaaaacgacaacgtcctcttcgttgaacgtcaagttgagctgaacctgctcgatcttgccgggagtcaacgcgcagatggcgatatcgacgggttcctcgctcagggaaaagtcctcgtcgtcctcctcgtcctcgtcctcgtcctcctcggtggtcacgccggcagcactagcctcgttggccttttcaccgtcgagagcgggaagcgcggcaatcttggccctcatctcctgcttgaactctttgacggcctcgtcgtcctcgtcgtcgctctcgaggtcctcagcggtcaacccctcgagatcgtcttcgtcgtccgaatcgctcatgtcgtcctcgtcctcgtcatcacctccgttcaactcggcagggttcttgggctcaaaagcgaccttgacgacggatcgggcgttgacgtcggcgacctcgtcagtgagagaggcgttggtgatcacgaagtcgtttcggaccaacatcgggacctcggcaccgccggcgagttcgagatgccacagagcttgagcgaccattgttgcttgtttgtttgttaataggtggtattcaattagggtagaaggagatgggcgtgtgtgagttcagaacgtctcgtgtttgggtcggtttcgttggattcaacgatgggtgttagcgatatgatcttcaagtcaaacgttcttggatgaggttccctcgacaagcgtcggaagcaaaaaatgggggaaaaacgtaaaaatcgaatcttgatcacgtgataaaaatggacttccggaagtgattgacgaatagattatcgatcaacatcgactagaattcacgagaaggaagaggggacgggtcgggtcgggtccaacgatatctcagcagtgtcaagatgcgaggaaacgacgtcaagagatcttgccagtccgaaaatcctgtcgataagaggcctgtctcagccttccgcgcaaagagcgctcggttttctcgctctttgaagcatctgacggtcgacgcttgatcatccgctcagatcgttccatcgacgtgaatcctaggtcatactagacagcacgttcacacatatctgcactagctttaatccatatcaacagcgttccttgggtttgaatcccacggcatcgagatcctgcaatagcgcagcggccacttggaacgcccgtccaagtgatcgctcatcatgctgcttacgaacagtggcgagttctcaggcaaccccgtgctgtctcgttacgtctgtcgctagctctctccctttccctctcttctctcggtcgatgaatcgtcttccagtcgaatgcgagcgcgatcactcaagccgtctttgacctcgaactcgagctagatgcgactatagtaccatgaatcggcattcacaaaaactcgcgttactcgacagctgagtcaaccagccacaaacctcgttcttttcaggacgaccctgctgcacacgggcacggctcctgcctcgatacgccatatcgtgacctcaatttcaactccacctccagagacagtgttcccagcttgcccaatattccgcaacattcaggtaacaacttggatccaaccgcttggcctccagatggcctcgatgacgcaaagacggggaaaatcggggtctgcaagtcggatcgaatctcgcaaaggagtccagcaaagagtcggacggcggaggcggtctcggagacggccacgaagagtcccaggtgtatgtcgggatgaaacagggacgcgcgctattgtttggcgacgtccaggttggctgccgaatataaagcttgatgatcgccggcagcgaccaaacctccctcgaacagcttgctgacaccaccgctgttgccgataacgggcgaaggattgtcgcagacgactgtgcctgttgtggccctccgatcctctcgccgtgggtatcgtactataaatgccgatttatatctttgcatattttctcgcgattatattgatggctggggccgcttacacgcggcattggatacgctactaatacacgaacaggcgatcctgccacgacgcactcatctattctttgcttgatcatgcgagcatcactgtgcgccgaccgtacccgtcccgtgacgccaatctcgtcacaccctgcccctcgtctgccgcccgaatctgactccccgctgtcatcacgacgttcatggcggagtatagaccgacttgctccttccagtcctgcctctgtctaggtgaccgtcctgttgatgtcgcatcaattgttgccgtaaaagtgccgtcccgtcgtcatcacccgcaccaccaccgatcccgcgcacaccatcgagtaaaccaaaaggcaagccatcctcgttgatgaaatcccttgcaatctcacgctcggatagctcactcagaggttctccgcacgcgcaaatgtcacagtctaattcccgaagcggttcgcgatcacgggcgcggagcatgttggattgttcataggtcgggagcgccaggttctttttcgtacagcagcactgcaaagtagtcgatgtcagagtcagcgggaaggctatggcggggtggcgattctcgagggcgaggaagcgcgacttaccgacaggatgatcgtcccctgcgtgaggatcgctttccgtagccttccagggccatccttgggcaaaggtttcccggtagcatcttcaccccagactgaaaagtagaactgtaaagaaaactcgtgcgtcaccttgataggcgtgatcgtcctgtcgagagcgcggggcgtaacaaacatcagcaacgccacgtgagaatacaagagtctcacacggccggactgaccctgggcaagtcgaaggtctcagtcggttctcgtctggcatccgcagcacctcttgtaccgccatggccgcgcgatcctttttgctcgccggaccagacacctcttctccctcccaaaggggctcgggacctctcaaccctttactcgcaaaccattcgtcttgactcttgggcagtttgcccttttcgtacaagaccaagctcgtcgcagggaacaaggtctcgccatcctgtggccgacgtggcgaggtcaacgagatcctctgtgtgacggacagccggatacaccagacggtggcgagcgggttgtaatccgtcaacgaggattgaaacgcgatcaatccgctcacggtgatcgcgtccgtcctcaagctccatgggacgatcccgagcccggcgacgagggaacgattccgaacgtccaggggtagactctcccggttttccgtgggcaaggggatgatccacatttctttcgaggtgatcatgtttccctgaagccagggaatgtcgtcccatttcacccctcgggggagactggacgcggcgggtttcttgtcgataaacgagttggggtagctataccctgacccgtgtcgactaagcgtgggttcggtcggggtcgtcgctgtggacgaagcgcccgagttgagtgagagcgcctggaaatcgttgggcaattgcatgggcgaaaacatgggcgattgggatggggattgacttcgaggggagacgggcgttcgatcgcccgagtaactcggacttcgcgttcccgacgtcgaccccgagcggtaagaaggcatcctcgacgtctccctcgaacgacctcctcgggaagcttccctcgaccgacccccaccggaaggctcccgtgacgatcgtccgcccgcgctcgattcggcgaatagaccaccagggtggttcccgatgggcgacggcgagcgtgttcgagagggcgaggagaagaaggctccgaacctcgaagtcgattggggttgaccgacgagcgttgcttgtatgcggtgagaaactcgaccgtaaggggtacgatcgaacccggccaaggtggacgggacgacaaaggcgtattcaaacctgtgcacagcgatgcaaagggtcgtcagcggtagctctcgcgatttgatcgcaaggatagggaaaataacactgacaattgtggccctgcgtcgataaagatgccctcgttattgggaccatcgaaatccatcgtgttctcatagatgacgtcgtcctcccacggtcgatctacacacacacacatccaccgtcgatcgactcgtcagtatcgtcccgttcgacctcgtcctagtcgatctaccgagaaggacccacctggatacgccagacgagcttcggcgacgaaccgaagtttgagggacatggcacgtctcggtttgctcaggttgacgacgacgaacccggtaagcacgaaatcatccctcgggacttcgacgtcggtcccactcggaggctggatgtagtggttgaaatccgacgtccggacgatggcgatcgaattgggacgggtggtgaaatcgagcacgtggccagagaggttggcattgtgcgtaaagggggccagagtgctggcgatcatcttggggttggcatagaacgaggccatggtgggcgacgtcacatgcggcagggcgagctcgagttcaagggagccttatataggtggtccggggtgacgaacggctctgactcgatcgcggtgaggttttggtcttgaaatcggaaatcgtttctcgacccgagtatagtcgacctcgattagggatccctaaatcgccgagtgtcgtcggtccagggtccagtttattcgcaacttttagatccaccctgttcgatctattcgcaactttgccgacgatgacacaaggtggggcttttggttgatcggtttattcgcaacttttgggtcgctgctgaacctcgtgggagcgggaattcgcaatcaatccggtcgattgatcgataagcaacggcggtcgatcgagtcagaggatggcgaagaggtggtggatgaatccaacgatcgacgtggtggcccagcagcagcgagctcgtcgtaagcagagccagggtattgcttcagagagaaccgactggctgtacgttgtagcgatattgaggttgtcaaccatttccgataacccaaccaacctactaaacagttccctatttggaggttcaacggaagaaaaatctagaaactgggaccgcgtgcgacaaggaatcggaaatggttgcgacgtctttcggggtctgtcgctgtcgagcatggctacagtgcagtacagaaggacggtgaggatcatcaagggtgacagggcagaacgcacagctcatcagggaatccaagaatgccagtgagaaacagtgaagtggttgatcggatcaaaatgacctggacgaggttgatgattctcttttcggacatgtccgacaaaaagtcgaaacacctgaattccagcaaacagatatgcaccgcaccaccttgtaactctgtctcgtcgaaacaagtatggacgctgcttcctgtcattgtcattgtcattgttgttgacgtcgtcgatggaaatacatggttgcggtaggtcaagcttcagattccccatcgctctgcccagattcgctctcgtcctgaacacccaagttgatccgatccgcagcagaacagacgtcagcatctcgtcgatcgacatttttacataactcgtcgtgcaaacgccgtcactcacctcgccataaaacgcaaacgccttggtcttggggccttgatcgtcctcatcttcgtcctcttcctcaagcaccgtctcgttctccaatcccccacccgtccgagatccgggtagagccatccctggaccgccacccccggacccgccactgggagtgtttccaccaccaccgctaccaccggcatagtccccaggtcgaggtgtacgtaacctgtccacactcggcctcctctccccacctgaccccggtcctccacccgaaccgccgcccaacgtgatcgtgctcgccgaactcgtcgcacgggacgtccgacctggtcgacccgtacccgcactcgcgccggcgtgtccactgtccacaccgttgtcttcccgctcagtatccttttcgctctcgttcggcgtctccgtttgagcaccaacggtgcgctcactacgggtccgactgcgactgtgggatttcagtcgacgggccgacgatgacgaggtgtccctaggcaaggacatgacggatcgagtgaccgaacgggaacgcgatcgggaacgcgatcgtgctcgacgttgacccgtggtcaacatgggatccaagttcgggcccaatcgactactcgcccgaccgccgccgccgtgcgggtagagagacattgaaccgaacccttgaccgagctcgtcctgaccctcgtgctccatcgcccgcgtcttttccgtcaaatcgctgctcgtgtccgaggttgacgaatcgtgcacgatgtcctcgcgtcggctcgtcgttcgtcggttcggtgggtgttgatgatgatgatcgccgcgtttctgcttgtcgtgcaaaacttcatgcaagccctcgtccaatcgcttcgtaaacgcttcaggattcttggccgacggcctcgatgggtcatacggagcagcgaatcggtcaggcgtctcgaccccactcttcataccggggtcgtcgtacccgccatcaccgccttgagaagtcatgctcaatagactagtcaacaggtgcgatggccgcttggtactatatggctggggacgtgtaggagcggcagcaggagccgcaggcttgggctcctcggaaggcgtcttgtcgctctcctcggaaggtgatgacgctggaggttcctccgagacgctacgggggcgaataggccatcagtaccgtggattcctcgaggtcggagtgacacggcacgacacgtactcatcaatatcgaacccttcctcttcttcctcgtcatcatcgtcgtcctctccactttcatcctcgtcatcctcctcctcatccttgctcttgtcgatctggccacgcatcttttcctgttgctcggacaccttgtcctgcaatcccgacatgcgctcttgccccatatcagcttcccgcttgctggcctcgatcctcgccttgtcatccagaccactctcgacggcgttcggacctggacttttgcgcgaggtctcgctcgtaatgttctcgttgccgcccaggtcgttgctctgcttgccatccttggggacccgctttttagtcttgtccttgaccggcttggcgcgatcctcttccacgacgacaaacgacttttgcttttctcgttcgttccagcgcaacgttcgcgagatcgagttgaaccagtcggtcgattgcttgtcccggcagatggtcgggaatggatacttgctcgcagcgatcttgatgtggtcgccctctgtgagcgacgtgtcagccgaggtcgcccttctacggcgatcaatagctgcgactcacgcttcaattcgacccgcccacgaccgtcgaaactggcccaagcagtactcctggaattgtacggcacgcagacgcgcaattccatcccgtcgggcaagagcatcggtcggaaagacagcgtgtgagggcagatgggcgagatcaagagcgcagggataccaggatgtactagggaacccccggcggacaacgagtaggccgtggacccggtcggcgtcgccacgcagagaccgtccgcctggaccgtggtgagatgatgatcgtcgcctggcgaattgcaatgtcagcgcgatcgcattatcgagcaacgatagacggccagacttaccgaacaactctagcaggctgacgtacggactcggaccgcggtcgacgacgaggtcgttgagcacctcgaacgtctctacgggccgagtggaaaagcacatgatctccttgtccttttttctctttgccttggtcttcttgtcatcatcatcgtgtctcgttccttcgagcgcttcccacccctcggcatcgacctgattgagcagaatatcaccgccggtcgacttgatggccttgcgtttcttgcacgtggcgacggcggcttgttccggtgtgaccgctcgatatacggtgcacgtgaaccgcatgcgcaggttgacccggatcccatcgtccaccgccttgtccaacgtcttggcgtaatccgcgaaatcgaaattggtcaggaaaccgagcgatccgagggcaaaggggaggacaggagggacgattcgctggaacagccacgaggtgaacaggactgtgccatctccaccgagctgtcgaaatcggattcggcatttcaaagtcagcggggtccaccttgcgcaccggcatccagcccgatccaatccgggaaactcacggtcacgaccatgtcgaacaagtgcggctgactggaacacatctcgctcgtccagtacctcagctgtccctcttcgccagaacctccgccattggtccgcctacccgaagatcgactggcgtacccgctggcatccgagacgaacccggacaaggtgctcatcgaggccgtagacgaacttcgacgtcggtagagcggtttaaagagttccgggttggattctctcaaaccggcggcgtcgaatcgtttcgatgtgcggagttgggcgtcgacgtagctgtcacgacgattgcaggtaggatcagtctagtgagatggaggccgacggagaccttgctactgacactatcatcccccgatcgctattggccgtccgtttcatcttcatcaagtagacagcgacctctctcgtcaacttgatcaatcgattatccctagccttggtaacgatcaacacgctctgaatattgctcttgaccttggtccgaccgagctgtttgctcatctccctcacccccgtcgcggtctcggccagttgacgggtgagggaaccgccatcttcggcatcgtccaggtccgagggggagggagcgcagatcttttgacgatggtccgatccgtcttgattcgtgccagcgttcgagttggtatccgaggcgaaatcggacggggtggagaaacgtggggtcgggccgtccgagttgtaaccaaacatcgaggtcaaccccgtgcgcgaggtagggctcatcggagatcgagccatgtccccctgatgagactgcctcgattcagagttgggaatcggacgaccgtatgacggatgtccaccataggcctgctgttgttgttgctgctgctgctgctgctgctgttgctgatgctgctggtcggtcgcgatcttttgcctgacccgatcgtcgagctgagagtacttttcaagctgactgtgcacgaagcacgggctcgatggcgaggtcgtgtccatcatctgacccgcttgacgttgatgatacgtatgattccccgccctcatcgtgtccatactcgaaggtcctggtgaagagtgcagtcgggacaacggggaaggtctcgccggaccacgacgggtgttgggtgacaagccagacccgcccggagaagagcttgaccggtcgttggcgtaggacgtcgctcgggcgatcgagattgtaggtggtgctgccgaggtcaatcccaaggtgctcgtaaatggaggaggtgatgtcgtcgatccagggctgacggcagacgtggatgatgacgacgagcccgtcgggaacggctcagagtttgacatcgtagacttaggcgacggcggcggctggcgtgcaaagtaagattaccaccgacaattcaagcctgtgtaagtaagctatgatggcctgttgattatctagacttgcaagttgttgccgagggtggtggtggtatcgatggtgttagctggttggtcgagtgacgggaagcgaggtcgacgaacatgcgggactccggatgacgagagacggcgaccaagacgatgatgaccaacgacttgggtatcgacaacgatcgtgggcaagtataatcacacgacaaaatagctaggaagagcgtcctgcctgaaacgactgagacgaatgtgattgcgacatggtcagaggttggtcgaagcaacgttcgattcgaaatcgaggtcgagggcggtccagctcggacttgcgtgcatcgttttctacgcggaaacctaaaatccacacttcatcgatcgacttcaagccaaattcaatcgtgagcgatggacttgcaaccagtcccacatacagctcaaacacatgatcgaggagttgagcgggaatcgtttcgtctttgtcatggtcatgttgttactagagcattcggtttcgtgtaaacacgatcgacacgctcaagggaagcaagcaagcgtgttcgcagagcagcttcgacgtgaacaggcgggaacgagacgtcaagttaccatttccccttgaaccgtatgagccgtaggtgatgagaaggcagacccttgcggatatgctcactggtcagccccgtcgataaatgatcgatttacgtgatactagatttcagaactctcgaagaccaagatccagcatatctgatactcatactagtccccgaaacacccgcccgaagcgcttggcagccctgacgagacgttaaacacgtgcgaacatgggacaaacgcactctggcgaaagttgacatgcctcgagactagttccacgatagaacagctgaacaacgttctcttggtattgggtccacgaggtgtcccttgcggcagcaagtcgaaaacggagcgttccgccgggtttgaatcacctccggccccgtagtggcgaaagcgaggcgacaatgagacgcccaggtcgagtaaccttttgttcaacaggtgataggttcgacgactgatcgaaaatgacgtgagcagatttaggaccaggacctgtcgacatccctcaccaagtgcctccgatctgaacgcaaagggggtctatcacaacgctttcctcgatcatgccgaatgtactggtcgttgagaccttcgaaatttcaagacaatgctcgacgatgtctcttgcaaagatcgtgatgtggcttgtgaacaccaggtgggggatgtagccacggcgtgtgacggtggtcctaacgaccgagcccccgacagagacagcgggggtgtcttgtctcgaggagaaacatctcttcaaagccagcgatgtgagccaattatgatactgcatgaccacaattgtggcctcgtcccggacctcacgttcagagtgagtggaagggcgcctgaagtggccgctatacctgtagaacttagtcaaccaccgcatataaaacgacgcacagatccgcctcatttctttctcaccgacgacacgatggggctcacagtgtgtcgtttaaagagaaaaacgccacggctacgagtcgataactagcaaatctaccaaagtctactatcgatactgacaccgcttgactacgattgatcccccggaggcatcatcgtcgttcgagttacgaatgcgccaaacccggaaggaaaggcttaggagcgaaaagctgtgaccctgctggcagaacgaccaagtatgacgaggtcttgatcgtcatctgccatgagttgctgagtaaagatctgggtggtgaaccgctacatttcgacgaggcgcatcttgagaacctcggagcacatcacacgggatccctggtgaactgaacgtccgtgtggctgcaaccacacgagatgcggccatactctgaaacagcatcggtttacgtcaccttcaagcgtgccatcagcgtcgcagtgcttggagcaatagacagaatgaggtttcgagtggactcatgcggtggcggtggttcgatcgaataggtgacgcattgtgccactactgacaatcctgatgattctgtgcaattgaggcatagatcttctagcaatgccactcgagaacttgattagcgcgttactaaatcagccgaatggcacgaatgcactcctgaagggggggatctggtcgtcgtagtaggtagagttgggaatcggaagtcaggtaggtaatcatcatatccttggcttaggaaccgtgcaaagctccagggcagcgcatcgcgtggatttcatgaggacgacctcgatcggccgcgatatgacgtcgacatcgatcccgtcacgttagcgcgcccgagctcataaagccttgagtgggcggcaagctgtcaacgatgacgaggggaacgttcacaatctccggctttgccctgaataggcccttctcctttatgtgtgtgggaatcatcgccgagcagtccaaagtggaggtgtgggtgttcgtcggaggaatccatgtcgagagttgcaccatatgaccgcccctccctccccgccgacgatttctccgaacttggtgatcctctgggtatataatatcgacgtgccggtgttcgacggcttgttgcccacgacagcaggctctcgtacctcatagtcagttcaatcgaaacatctcgagcccataaaccttatcataatgtccaaagtcattgccagtgagttttcgtcaccacgatcgacgaccccatccgcatcgatatatcgtacccggccctgacgcgcaacgccgatagtcaccggagcgaaccgtggtctcggactcgagtttgtcaaacaatacagccaggacgacaacgtcaccgtcattgcctatcagcgtagcgatgatcgatcggctatcgaggcgttgaacaagtccaacgtcaagatcgtcaagctggatgcggccgatagcgaacaggtcaaggtacgtcgggttcgcgtgatgctcgtccgatcttgaccaaggtgctgacccggtaatcccgcctgatcctctagcaagccgtcgaggagaccaagaagatcaccaagtctatcgacgtcttgatcaataatgctgccatcaacaccgggtccttcaagctgaccgaagagtgagtacaaagccggtgttggatagcggtcgacctaaactcaaccccacaacctcgttctcttcatcccgcatcgacaggcaggatctctcccctatttccaaagtacatgacaccaacgtcctcggacctatccgagtgaccacctcgctcctgccccttttgaaagagggcaaggacaagaaggccatctttatcagcagcggagtagcttccctcacgaggacggtcaaaaagtctttcggacctatggctccttatgccatgtccaaggtgagtcatactgtcggataagacgacgggtccatcccagatgatacaccagttgacttgtcgcgacttcgtgctacaacaacttaatagacgggcttgaacatggtcgtcgcgctctactcggtcgagctctcagacgaagggttcacctgtctcgcctttgaccccggtcacgttcagacggatatgggtggtggtcacgtaagtgcgagaacatgtcaaagatcgtcgcggctaggatcaatgctcatcacgacaccttgctctgctggtgaccaggcacccttgactccacccgagagtatcaagaacatgatcgccaagatcagttcggtgggacccgacgtcaatggaaagttcttcgccgtcaagggagacccaggtcagaccaagatggaagaggaggattggtagtgggctcccgatcatagtagtgtccacttggaaaatgaaagaaattgcaatatgattatacgctggcgatgctgtgccgtgatcgccgtcattctcgctcgtctcacttgttctccttttcgacctgaatgagcatttcctcaataaatttggtgtgggcgctggtaggtcgagcgtagccaaagagagttcaatcgggcgagtgtgtaatgggtcacatatccctgatcactgacctgaaatcgatattcttggtgcacactcctcggacaatccccttgacgtcaatgaagaacgtagcacgacctgttatccgcatgccaacccgatgtattagcgagactaaatggtactcgattgtcaatcacggcccgacctacctggcacgagccccatgaacgccttgtctaccttgtacgcctgacgtgctttttcgtcgacgtcagagatgatccgataggggagcttgtactgatcggcaaaggattgctgcttggccgttgaatctacatcatgttgccgccatgcacaaagtcgatatctgatcagctgggcccggcagtcgccagaccgtgatatgctcaccagccgagatgccaacgacgtccaggtctggatgccgcttgaaggtgatattgctggtctgagcatcccggaaagcgcaagcttccttggtgcaacctgtcgtattggcttgcgggaactggagtcacggtccggaatggtatcggttagcgggaacaacgatggtaaagtggatttgccgcccactcacgaagaacaaggcgatgggctgatgcagacgactttgtcagcgatttggaacttgagctcggatcttgactcgagacttgccttttcaccgatagggagacggtacagatcaccttgtggtacgcatggcagctcgagtgcaggtgccgcttggccgatgaggggatgcttgggtgccatgcttgtgagctcggtcagggcggtactatggttgtctgccttgttcgtgacaggttgcactcgatggatgctgagcagatgcagtaaaccattggaagagatttcgatgctatcgagatgaacatttttgcaagatgaaccgatgatttgatgatctatttgcgttcgatccccggttgttcggatgaagccggtcgccgaaaagtcatctcgtgtcccatattgacaggcgacaagacccagaggacctcgctatgctgctgtcgctctgtgcaaatagtttaagaagagtcccgtaacctgtaggtagcagctttggacgccgactgtacgagatcgtggcaaggtcatacatcgaagacagttggcggacaagcgcagaaatgtgtatacaattcggaattgatgaaaatcctttatacgctgattgaacttcgacatgcgtcgagagtcctgcctcgaaattccgagcctcactccatccatcggaaaccgggctgctttgtccccagcttccactggtcttccggggcgtactgatccacataatggtcgtacttgcctcgatctcgagcgcggttatcgcgcttcatgtagatgaggatcccagcccagacaatgatttgaagtgcagtgcatgccaagttgaggcccgacaggatgttgtaccagggtgcgtcagaaggcagtgcggtccaggtcgaaatgagaccgccactagattggacacaccgatgtcagttcaaatgtaccctttgcagggaaagcgctcgagccggactgacgtgtttccaaacatggcaaccagaccgatcgcagcggccctggagctatcgctctgcagagcagatcatttcgtacgtgtcagctgggaagaacgtctgttcaaacttgccggcttcaaactcacgaccacattccccgatgtccaggcaggcaaggtcggccccggcacgaatgcaccaccgatcgtcaagaagatagctccgtacctgcgatgggcacgaaccgttggtcagcttgtattgtcgatcctgcaccaatacatcccatactgacctgacgttttgatcgtgggatcccagcaaaatggcccatccggcgagacagagaggcgcgactcctaaaacgataagacctcgtttgttgatcttcatcgagaggtaagggaactggcgagatgtatgacttgtgctcagtgagacgctcttggccagccgtagctcagcgcgaccgactcacgatcaccgtgataacagctccgacaatgtaagggggaactgtatggagttgttgttggatgacgctcttgccgggataaatcgttcgaacaatggtctgcaaggggcgcgggatgagcggtagtcttgtgagaatcgcaaggccaatcccgttgctcacaggagtaaagaaaccaatgcctgagagcgagacaagatgacattagctcatctccctcaaagcatattgaacgtcccacgccccgatgctcaccttgcaccgagatgttgttcaacaaaaaggtgaatgcgatggcgatgacgaccgggttgccgagaccctgcttgatgcccgtcttgttgagtttctcgacgacgacggcggacccgacttgctctctcttgatccggttgtcggcgaggactgtggggagatgcgaatgagcgtcgtactcgggggggaacagattcgaggcaccgactcacgcttctcctcggcgctcaaccacctagcagtctggggatcggcggtcatgaagaaccatctattccgcaatatgtcaggccagagtgggacgacgacatcatgatctgatcaagcgctcacgcaaagatcccgatgacgaccgtgatgataccctcgagcaaaaagattactggggcggtcaagtttcagtcagcgttcgtgctgatacgcaggctcagtccgacccacattcccatgatcgaacagaaccgatcgagtcgattttgaggatcccggacgctaataatccgccaaatgctccggctagaggagagcagactaaacatcggagcgaacagttcagcctaatgtatagactcgagtacacggaaggattgagactcacccaagtacatggccagtcggaaggcgagttctcgcttgggataccatcgggacaagtaataggcgattccaggcagcattcctgcttcggcggcgcccaggaggaatcgtacggcacacccggaaccgagatcagtgacgaatgccatgccgatcgagagtatcccaaacacgatggtgtaaagtgggatcgctcgtccgggtccgaacctgcatcgtgatgattgggcaatgtcaattagtcggctgatccatgtcgaaaccaatctcgagacttgccacttggtgaacatggccgctggtagctcgaatgcgatctagagcaaagtaatatcccgtcaacctcccgcaagagactcgactgttcgctgcagaactcacatagctgatgtagaatacgctgagcaggaggttgtagtcatacccgctcaagccgaggtccttctcgaggccggcgatcttggcatttcctggtcagcgagaggggatgtcaggatggatactttcctgcgctattgaggtccagtagctactcaccgatattggctcgatcgataaatgcaaagaggtactggatggcgacgatgggcacgacgtaaatgtccatctgacggatccgaaacacgtggtcaatgatccaaactttcgtcgaaacgcaaagctccgcgacccacctttctcgtcaaacgcttgctctcggcttcatcgatatgcaagaggttgccctcggcatcgttggcgaattgcttgctcatgtgctcgccgtcgtagaccggatcctgaaggccgccatcctcgacgtgaaccacctcggccttgtcgtcttgcggcaagtgtgatcgtttggaagcaaacatggatgtcgatctggtgggacgatcgatagtgtagtagctctggctcggcaggaagacgccgcatgcgactaaatttgggcgacacctgatccccgcactctttcgagtacatataccagtcagacccgagtgcaagtcaaagcggatgccccgcaattatcattccctggaattcgagctacgaccccgcacaagagtcatcgacgaggatagttgtaatgtcggagacaattccacgctatcagtcctggaaaaaaggggcggcggggatgtgaacgcgccgcatctttactccacatcgaagctttggaccttcaacaccggctcgcggtgggaatcgctcgaacatggcttgagagcagcgacaggaccgagcaactgcaatatcgaccgtgggttctcgattggtaacgcattactcgccctcttcgggtattcgtatataccctggaagtctctctgcgcgccccgccttagtagtcgtggctagacttgtgcagcaacagggcacctggatctcgggcgattgttatggagcacgtacctactcggcggacctgcttcgtcttctttccgaagactaccccggtggacgagtggaaggaccgccttggatatctttgcattccgctgcgtcccccgggtttcagcgcggacatcaatcgaagtggacgatccgacggactaacacggccgcgaggtctagtcaaggatatacggtcggcaatcggtcatgtgcacggcaatctaccggtgtcagctgctcaaagcggggtcggcgttggaaatcatccgagcatcttgtatggatgtggggccttgtcaccttcatcgttgacccctccgctcgcctggatgagagaattcccgttaaggctggatatcgagtccaggatcaccgaataggcttcgaatgggtcaagtcgggacgtgcatactttgatggaactcaagtaccgatcgccggttctcgggatgatctcgcgtcaacttttccgcactgcgctaggtctcatcgaattagaccctggccacggtcaatgcgcattgccgccttgtaatattagatgggcgccttctcacctatggaacaaagatatcgacccgcatatcaactcgaaaagatcatacggacgggtcgagtagcgtcgttgaccaggaattacgacgccacgtggtcatgcatgtcggccagaaccgatacgagctgcgagctggcttgcttattggccgcgtctaggtgtcggacaccatgaactcctaccgtatgttccatcattacaatcgccttttactgtagtcggaagtctcagaccacatgcagatggtatgccagtgtgcttagcatggctagacctacagatccgactgcgagaatgccgatgatgggtcgaagcttggcattttcgtaagcctacgtcaccgccactctcagcaccgagtgacttcaattccacgccttcctcatgcatggcacctcgcacatcagaaccaggccatcttacagacgccgttcacctctgcaagtcctcttggcgctgtgaaagctggattctatgggcgacgatgcggaggcgttggttacccctatcgataccatcttcacgatcctgtggcctcgacctcttaatcatcgaatcagtcaatcttggtcctcacgctaataccacacattagcaatgttggcctcatattgacggcacggcgtatcatcacaccttcacgatgtccgaatgcactcaggtgtctactttctgtcccgtcgaagccacggtgtacggatactaccccaaccttggagccaacgtcttcttttgtgcaagctttgccgggtttaccgtcgcccaactagtgttcggaatccgatacaagacgtggacatggatgatcgccaccgtcgtcggatgtgcgatggagtcgatcggctacggaggacgtatcatgatgaaccggaacccattcgacggcggggggttcaagatgcagatcgtctgcctcatcttggcaccctcgctcctctcggccagtatcgacctgaccctcaaacacgtcgtactcgtttttggaacggaaaagtctaggatccgaccgaatctgtacacgtgggttttcatcggactcgatgtcgcttcaatcttgatccaagcgataggtggtgccatcgccgcgtctggggaggaggaccgatcgctattggacattggaaacaacttgatgctcgctgggatcatcgtacaggtcgtccagctggtagcgttcgcactggtgacgatcgactatgtcgtcagaactcgcaaagcgttcaagggcaggccactaccgcccctcggagcgtactacctgcagtcaaagcggttcaagtggtttacatatgccgtcattggagcctttagtggcatcctgattcgatgcatctatcggtcagtcgccatcgagcgtgcagggtcgtccgaatccgagctgacgggcgtgtcttggatccatgcacctatcatctagtatccccgagatggctggcggctggggtggagcgatccaacgtgacgagatcagtttcttggttctcgacggagggtaagtacggttcgacgagtatgttccggaccgctgctgacaatcgccacgatctattgtcctttcactaggatgatctggatcgcggcattcttactcacggcttgccatcccggtgaatactttcctcaactttgtaagaaccgcgacgaaaggcaggagcgtctcggtctgggttcgcctttcgatgagaagcgggatcagacaccttcacctgcatgatcactactgcagagacaatttcatcgagcgtggagccgtcaatgccgtcggaccgtatccatagattatgatatcaagtcgttgtccaacgttacatacaaccccagaccaagagactggatacgataggcgttgggagatcttattcgacaatatgtatgcggactgagccccggaaagaaaaagtatagaaagacgaccacgttgcgtaatcttgagcgccagctaaacgggaggttgcctttgggtgtaaccgacagaagggaccaccgggacgccgctaaagtacgggttgtaatctgcctggccggatccggggctcgaatagggcggcgatgacatggtaccggactgcggcgagcacagcttgggttcaaacagaatcggcgagggttgcgctggcaaagaagaaccaccgtagaaacgtcccttttttggtttgagagtgacgtccggagcatcgatcgacaatccgagccggtcagcttgcacctcggccaatcggactcgaactttttccttggcccatttgatgggagcgctcgctagaccttgataggcgagtttagcggagctggtggagggcaccgcgattccggcaatggccatatcgactgggttgagaggagaccaatgagctgcaccagagaagcggaacccgagccaaagccatccaaagaggatgagggcgcagtacactagcggagggatgcaaaagaggatgtaaaggctgcccttttgccctagtcgtggcctgggcgaagcgagacgatatttcgtcgttcgtgctgaagcgtaatcgggcaagtcgtcatacatttcctgttcacagggacatgcattcaaggtgagaatcttggccatctctcgaaacaggacgagacactcacggtggcgccgatggcaatcatttctttgatggaattggcgacgcggtcactcttctcttgactcgacgtggtattccccaaaaggccaaagatttcgaatcgaccgtcttccccttgttgtttttgcatcgctggacggaaggtcaagccggtttagctttaccaaaagtcgactgtaatgtccaacaagtctcacccatttgacccaaaaagttgatggtgcgcttgaattctaggctcggctggtcgatcctggcaggcaaggcaattcggtcagtctgacaaggcgtcggtactttgggcgctcggcgggctcacgggtcgcaatcgatgaggtcggagctctggacagcgctaccccggatctgaatcgcctccatacgctcttcactaccgattcggcaataaatgttgtttgttcccatctggtctgcgtaatcaccggtggctgcgatcaccaagggctggggtatgtcgcaaacaaggtttactggtcagccaacgtcaaaataataaaacaggaagagagactcaccaggtccccattctcgtagttcttgtcggtaaactttggaacgaacaaatgcgaatgatgttagatctgggtaatgtagatatcggcgacacgggtgctcacaagcatgatagatccagagctgtaatctggtcgctgcgtaacgtccccacaactcccgtcacgcccacagaatcgcgcttgttgggtcttcatgaaaccggaagtatcggtcgtgccgaggtcctcccagcgcatacccatcccgtccaagttatccttacactgaacagtcacgatcgttcgtggaacgcaggtcgtcacgatggtgtccgccgtcaccctgctcagcgcaccatccgagctctgcttcagcaaggtcgaggagagggtagaaatgtatccggcaacgccggccagattactcgggtaggtgatcccttcgcgggtgtagttctctggactagaaggaagaatgcgtcaacccggatgtacaagcctggacagacccttcgttgtctcacgtctggtctacaagttttcgcaccccagcgtcgagcatcattccgtctgttgcaacgagggggggcggggcgtcaacggtctctctcgaatgttccgcgggaatacaagctcacagcgatcgttgatggggcagttctgtcgaacgatacgaaccgttagtattagcgtactcggtgcgaactcgtgacgtctgcgacttgcgggtccatatccataattcggacggccctcatatctgcaattgacattcttctcggcatcatcatacgtgctgaaggcccttaggttgctactagaggtgtcctcgaggcgcccatcggtaggcgtcaacgatgcaacgatactctgcgagtcaaggatcgaggtaagaccctagagctggcttttgtggagacacgaagattcgacctaccgctcgggtgagggaatcagctgctaaaaacagtaaacccgccaaagcgtagcgactgaacgccacaggtagccctcctgcagctgttcgagagttgtgttaatgtcgaggttggaaagaccttgctcgcccaaaaactcacatagctggcttagtagatcgatctcattgaaagatatgccctgaccgagtcctcgtcgtttcgcataggcggtcacgagcgtggcaatggcagctcccgacacaaacgcgttgatcgaacccaagagggaagcgccgggcgcgagcaagcttctgtagctatatgtggccttcatggtgccgatcttgggaagagatgaatcggtcacgatgatgtcgacccattgtacgacgagagcgagggcagcgatacacgcattgagagcgagggcgacgatgatgataatgtgcctcgagagtttacctcgacgactgtgccaggggtagccctggtcgccgttttgacacttgtaccgactcgctttgagtttgcctcccatgatgcagtattgactggtgtgtggagtttaacaaaagcccacatctaagtcgacctggaccgttcgacgcaatcaatcgtgctgcatcttatactcgtccagcccgtcgaacgtcgtgtcctcgcgaacacctcgggacagctcgtgaacgcaggttctgggcgatgacagctgatcacccgatttaccgagctgctgacatgtcgagtctcaccgaaaggtaggagacgggcacagactcgacgttctcaggttcgcacggaaagtttctaggtagcgaggcgacggaatcctctcgttcgaaggattaaagtttgagcggatcatctcgcctatcatgatcagcagggcgggtgtgacaatccggaaccgagcctggtgagatgaccgagtagcatattcgaacggaagaataacgcgagaagatccacctcgaacgggatctgatacgagacgatggggttctcttggcaacggctcgcgatgtaatcgtggtcagactctgcactcgaggcggacgcaagtcagcgggcgaaaatccagctgactactcacgacaggcttcacatcttggatgagcagctgccagaccagcgggccatcagcgactgacggtcgtgatatgcctcctgttggcaaaacgtgagatctcgcgacaataggtcacctgggacttgaaatgcatccgatgatggtgggaagacggggatctttcgatcatcgaaggtcccgataggcgtggaaacggtttgtccgtgcggtcattcgatcccatgacatgacattctatgggatgtaatccgtgaaacacaagcacaatgtagactcgggagggatgacaggccgatacgtgacgttacaatctatgtgtgcgcgccgaacggggtgagaaacagtcgtggtctgggcacatcaggtgagcgaatgtccagtgctagaaacgtcatacttgctgccgaaatctctgtgagttccgacagtccgattcaggtgcgtccagccgggcccggatcgaggcttgtcgttattcttgcgaccgcgagtccaggtttcggggcgtgacggttcacccagatgagtgcgttcggtagtggtcttgcggtcggcgtttcgtgtcgtaaaatcttcgtgagatgggcgtgagactgcagtctgtttgaattctttcaattcgcgagcagccgaagtctgatgaggtgatacgtctcgttgcttgacaccgggtcgagccttcgtgagaggaacgtcagaagtcatgcgatcgtctccaaggtccgttttggtctttgccggaacgtccagagattgttgatccggggtgacggatgtagcagtagcatctttcggaacaatggggttcgtttctgtcggcgactgtgcgatgactgtgtttgttttcccaacgttggatgaattgccggacgtggatgtgctcgcgacgggaggcacggggagatgaaacttttcctgaagactggaccagttatggacgactggctccgggttgggaaaccccttgtgactccggttgttcctcttgcgtgactttttcgtggcgacttggcgaggtccgaatcgaggtatcggatcagagacgatgcgcgagctgccgataaattcggcaaatccggtggtgacattggcaccgttgtggatcggttcagagacaaccctacgtccggcttccggtcgaggtcgattggggtcgtgtgtaccagagtcgagaaagggattagcgagtgagttgtcgaatgtcaaagccgatgcggcgagggaatgacgggagactgccggagtagacagctgggtatagatgggaatcagctgagcctttgcttgcgatatttgtccttttgctcacctgtttgtcgcctcggtccttgatgaccggattctttccagacacgaacagcgtgggaaatgctccagcaagcgactcgatctcgtcgctagcaaggcgagaacgattcgtcgctttcgcgttgatactggtggttccgggcattcgtgggcgccgggctgcgaacttcggatgtcctagaccgagaccagcctgaggtttcgattgtgacgcgatggaagcaggtaagggttgaaggaacctgaaatcgtaagggttgcgagcgggctggtcgactttgggtgccgaaacataacgccagagccggttcacagccgccgaggttgatgtcgtagaatccgacatcggaagcggcgtagtcgtagggtgtctcgtgtcgagctgttcgtggtcgtttgaatgctgtcgcccagtgatccactggccccgtttagggctgtatcgcactttggctggcggggtggagtcgtcgcgggttgcagatgggtcgtgtagcgtatgttttggctgatgatgagtattgagatcgtgcgcatgggtcgtcctggaagcccaagaccctggcgtaaagaccgcctcgccgctaggactgcgtgaagcgttcttggctccgtttggcctcatcggggaggcgttcgtgctcgagaattgtacggcattctgaccccgaggtaaggtagacttttgaggcgaccctacgatcgaggtgcttaaagagcgtctgccaggtgaacccgtttccagacgcttcttcctttccgcagctgccatggcggccttgcgttcggcagagatgggcgagacggtaggtggttgcgggggaccgtagccatcgatgacgtgagatgcagagacggatcgagcgggtggttggggaggagtcgattgacggggttttggatcagggctgagcagtttgctctggaaagcaagggcgcagatgacggggtcgttctggcttgcctggtggtagagtcgtgcatcgctcgaaatcgcacgaggtgtattcttggaagagcccagtctggtaggtgccgtaacatgccccgagccagactcgaccggtgtcattgtctcggctcggagacctggtccggcgtgcattggcggggacacctgcatcgtgggcgacaggtggtcaccacgagttctaccggacctgggtatcttcctgccgatggaaagatgtggatcgttcaccacggcaggcctggaagtgtcggtgtccatatgctgcagggaggcaggaagtgggccggccaagggggcaggtcgattctccttgcttcccggttgaaatgtatgtctctcgttattcctgctccgtttgacagggtcgtattggttcgtgatagaatcgtgattcatgggcgaagttgggggtagaccggaagtttgagatttcgtcttgatcccccagacctgtgaaagatagccttgatggggatcattgaggatcgagtcggtgccgctaaagtccattgataggctgcggttagcaatgtgtaacagacccggatcgagacgcaagactcacctggggttacgagcataaggcagactgagcgaaccgtgcaaggcagggaccggtttgggaggagacggagtggtcatggcggtaggattaatgatgggtcctgtcactgcgatcgtcgtgatggatttcagtgagcacagtcagccgagcttctggtcggttgttgaagtcttgaatgtcttgtagccgtgacgagatcctcgtagaggcaggaatccgatctcgtgatagtaataatgttcgtaaaggagatcgtgatgggcaaaggaaacggtgtccgtgaacgaacgggtggcaggtcgtgctcgtgagctataccgagtagcagaggattgccaggctagttgtcgaatttcggcttggggacaagtcacagggagttccaagtggaatcgaagaggaatgctgcatcgaaacggtcatgaggatcagactcgattgatgcctgctttgcgcatggccttacctcgtctcgacctgttaagaacagttcctcccgacgaccggccagacgactgaccaggtacgacctacggctggaaatccgaaccaattcgagcttcgtatggccaggaccgcagtgatacgaatgtttcttctgaatcaagaagaggttcgatgatgtcgatctgatggacgagcattcgagccgaggtcgttcgcgtcaggggccactagcccactgagcgtacgagcatataggcgaccggtgctcgacagattcatcaacgaaatcgattggtgcgacttggactagcctcgacggttacagtgtgttacaatttgaagagtacatgtcattagtgcctgaacatcactttcaaacggtacggtcaccctttccacctagactcgccctcaaggcgccatccttcgcaagcgatctctcgcttattcgcacaaggtcgtcaggtcgatcttcgtgaccaaggtggcaaagctactgggtccagtgacccacagccagccttccttgcggtcgccgttgtcgacctggtcgagaggcaacaagaccgccgtcgaagcgctactcaaagtatcgccgtcgtcctgaaagatgatccgtttcctccacgtgccagtctcactcttggacaagtgccagacgacgctcgggtcgacatatgactcgtttcggaaatgagggtcgtaatcgatcccacggagcaagccggcgaggatgtagccgctcgtatcgcaagacctggtagggtacgggtctcggtagtacgacgggttgtcgatcgtagagtcgaggtgtaccgagtctaccagctcgagacgaggtgtggtcgaggtggattccgggatcttggccaggtgaagaactcctccagctgcgtcgcaaatgatggcctcgtcttcggtcgctccatgtcccaacccgttattgttgtgcatcccatcgatggccacggtcgttgaaacgcccagatccccgtccttgctctcgatgtcgacccggacgtggattgtctcggtgatatgagacatgcttcccatccacagaatttcaaaggtccgctttagaccctgacgatacttgtgatcgttggtcacgtagaactcgccgggaccgaggctcaggatgtcgttcggaaccctgatcaacgggtgccggacggatcgaacgtgacgtgcagagtcggacccgagcttgtggtggaagatttcgatctgagaacgggcgtgattaccactcgacgtgtcgggatcaggcaagtggttgacggcgtgaacgtagatcgagtcgggatccaaaggatctgcagcgaggtcgataccgtgtgtgacgaaaggtcccttaaaaccatcgagacggagacgttgtgatgtgaatgtctaccgagtgcggagggtagaaagtgagcggttgatattggtcacgatgagcggaccagtcctgaccttggggtcgagcacatagaggctacccgtagcatcgccctccccggtaggaacttgatcaaacaccgtcatcggtggaaaccatctcatacgaggtgaatgttgaccttcgcaggcggtgtagagtagaccattccccggccacaagtgtagatcttcacagtgctttgtatcctcgataatccggagctcactcccgtgaacgttctggatcgagccgacgggtcgagttatgccaagggtgacgaaacgttgcttggtcggttgataggcatagaacgcgatcgacgccaggagtaggccagcgtttcgtaaaagtttacccatgactagccgagtaagttgggcccagtgaagaagagcttgctttgttgcatctatcgctgatggccgtgtttctgtccagaacgatccgtaggacaccatatagttgtgtgcttgaatgaggttgggtcgttgatgacgaattgccggaaacagcggcggcttttaccggttatcgagttatcgagaggtcaggagaatctcacagtcgactcgagttacatcgatcggtcggtcatcagactgggtctggaacactacaacaaagagttcaacaggtagagagtatagtcctaattccaggagatatcgccagtcgaggctgagtctttcttgatcgaatccttgtcttcacttcacgccgctcctcccgcccgccactcgagtaataagatcatctttataggagtttcactggcaaactgattgactgatagcgtacaacccaaaattcaaacattgcatacgaaacggaagatatcttgctggccatattcactacttaattcgccatgaacccaaaggacgaaaagagcccgccaaaaagcatactgttcgtcctcgtcagaatttgcgcttgcaaaaccttagaacaattcgacggaaaccacgatcgcgagcaaagcaaatacgagtcgtccagtagtggtcgtgtggaacgaatttgcactcccgtttctcgccgacccagtggtggtcgcggccggagctctggtggagacggttccgacgctcgtacgagtaggattggtactgacagtcacactggcctgtccctcgttgagagtcggggtggcattattgaccgcgaacgtgccgacgtcttcccagtctgaaagatcttcatcctcgccgaccttttcctgtagactgctatacgggtcaaacgtcccggggaatccaagagtggtctcggcgggatccggagcgatctctgtggccgttggcgtaccactcggagcgggttctggaggctcggtcgccgttcccgctgcaagcgcagcttctgaagccgtgtatagaccggcactgtcgatgtcgatcgaagtttgaatgtcttctggaatcgaatagatgctgggatccaatggaggcccctctccttcacccgagtcttgacgacggtaccaggatgcacttcgtttgagcgtgggagccggtgtgggtcccgcaacagcaggtgcggtggtttcagcagcggcatccgaggtgggcgcaggattctcggcgggagactgtgcaggggtatcgctgggagtggttgacggggtgacgcttggttcatctgaaacgactggcgatgggctggcctcggacccgggcgttgcggtgggtgtagatgcgtctacagatgaagatgacgcacttggctcggccgaggaactctgggatgatgtcgcggtcgaggacgcttcggtggatgccgcaacgctcgatgccgctcctgtcggtttcaaccgctgctcattccagctgatcgaggtcgtcttgacttcggtactgacgccgccgagtttgcccaggttggagtcctcgggcagtctgatcctgatgaatggaacgtggtgattcgggaagggcaccatgtagttctgtcggcatcgataaaactgatgcggcgctgtgagctctaatggatccgttgacgcaagcgataacaggacggctcaccttgggatagtttacggtgctcgaaaatccagcggctctgaacgtgtacttgccggtggttaaacagggcatatcgaaccagccggtcgtccacctctgatacgatgccacctgaacgtccacgccgaccttgcctccaccggcaacggctccgacagagttcgtcaaccattccacgctagaccacagctgagtggcttgcgggatcattccggccaataatttttgcgcgttgaacatgccttcactgatcctgttggcagaagcctcgtcaccggcataatctgagatccagttgcgagtgaacaatgtctgcaacgagtcggcaaaggcgggaccccgttgggccacctgagcgacgagttctgggagtttggctagattgtcttgcaacgtgtcgatgaccttgggtagttgttgggccgctttcaagttgcccgctagctggccaatgctattcagcttgccatctttgatcagttggatgatactatcgatgcccaggtcggatacatcctcgaacagttgcaccgcgtccgtgatagtctttgtcgcctgttgagcgtctttctgagtctgggagatgatcccgttgagcgaggcaatttgtttcgacatgtccatggtcgtttcgactggcgattcaaggctgttaattggggccgctctcggtggaaccttcgtcaagactcgccttgtttcttgaaatcgctaaacgtattgttcaagcaagtgtttgcgtcggggcaaaagctatcgataatctttttcacttcggcttcgatctgccctccctgcaactgcagcgcatccgtcgagttggcaagggcatcaaagttgcgttggacttgggacattccgtttgaccacggcgaaagtagctctttgatttgcgatcccattaaagtctcagagtcctgcaggtagttggtaaagaaccctcggacagcatcgcaagctccggaggcagcgcaaggaacgagtgaagttgcaaaggcgaggtaccgtccgagatctatagcggcgactcgtcatcagttttaatttcgatcaacgacacatagcgctcgtgactcacccatctcggcggctttgagcactctgacgctagagctagttactagggcaccgctaccttgtgtcagtcccgcgctattgtctcgcacgttcatccccgcgtctacggcgcattgcgcaaagcttccaaacttttcaaggatttctgccgaagcggtacctgcgtctccggattgaacaagagccttgaacgtgtccgcatctacgacagacagcatctagaggccgcgcatcatcagcaacacgcgtggggtatccttcgaggtccgatcgtcacttgcctctggtaagcacttgcagatggctgcgctcttctgagagagctgctcaagcccaggaatcgccgcacgagctagagagcacccatccaccgacttggagcccacgtcgattcctatcggtgcgaccacggtgacggcgtctgttcccggcaggcattgcttgccacccaaaaacttgaacgtcgtcttgcatcgattaaacttgaaccacgtaaacttgccattcctgaccttgaacgtgggaaccttgaatgaagccttgcattgagtggctcgggatagcgaaaggcagagcttttgcatcgcgtccgagccgtcgctcgcttgaaccgagacgacgttgcagcagatcaccatgaagatggcaaagatgaagagtgtaggaggcatgagtcggtagcgcatgttgatgggcgtgtcgatggtggtgatgttcgacacccgaccccccctttttgtcctccatttcggtcgtcgaaacctggaccttttatacgtccccgttctcgggttgtcttctggtctcgtgcttcgaggtccttcgtttttttgcgctcgaatgctcgtgaccaactctgctgtgttcaagactttgacatgtagtcgctgtggtcgctaccgaaagatgtcaaacgatgtgaattcccaagcctcattctatacgtttcgtttcgaacgacgacacaaacgaagcgaaactcgtttgatcccgtcaagtgggtacgagacacgcgggatcttctggggttgatgacaacgggacgatcccccctcgtgaccaccaggtcgaagaatgaattcggaaccgacatccagttcatggttcacgggacggaagaagatacgacctgtgattctattcatccgagttttgcgagataagcaggatcgcaaactctaatcggtggtcgaggtccatcagatgactcggcgtggtcctccctacacgccgtgtccctcgggcgatgcaactagtccatcaggcatattcagccagatcatcgagtgatgccaagcccaagaaactctggtgactatcgttcctgcacccccataacctcgctcgcaatagcgagctgaatgtcatcgccggcaacctcatgactacggccgcgttccgtcgcctgtcgctcgagcgccctcaatatcgtgtcggctgagaatcaaagttgaggacggccgtcatagtcttccgttgctgtgttgtcgagaagaaccagtgtagggaccggtcgatacgttgattggaaaaattccgaagcgtcacgtggacgatgctgcgcgtgcgagtcgcccgtgacaagtcgaagttggccctttacgccacttatatatactcgtatggcagacattgacgatgggtcgaagcggatcgagatgtactcgcaaacaagagcaaaacgagaaacatcgacgtggcattcccggtacaaagctcaatcgagtgaacgataaggggtttgcgccgagagggtcctttggcgatcaaaccttgaatttgtcgtatatgtccttgttgttgttcgtcgttttgtttctcgggtcgcgggtcgtgcagacatgtcgaacaatcaagtctctgtcgcaagtttctgatttccacatctgttcgacgtccgtccactgtttagaatgacccccaccccctcgaagatctgcggccatccgcacaaccatgtcctgcgtggctcctgattgcaccaccccgggcgaactgatcgaacggcaccctaacaacgactatcccagccacaacgatctcgggaagacgtactatctctacgaaataccgatgttcctaccagaaagaggcctgccgtcgtgttcccctgactgccgacaagtgcaaacagcagctcaatcttccggatgtctccaacaagccccatgagacggcggtatgtgatgtcatcaagaaatggatgaccaggctggcgttcggaaatgatgaaaggagcggcgtgatcgagctccaggaagggtcgctgttgctacccacaagcgatgcggtggtgttctgtcaaggtgatttgggtcgtgtctcctggcacgtcgaatcgcagcttatcgtcggggatcctttccgctgcccgtcatcgaccagttccgacgactcactctcaacgccgggcaacaccgtcaattcgctcccaccccacgacgtgactccgtgtaagaccagcaacatcgacttgttcgtccaggcgagatgggtgtaacccgagtacaaccccgcgatcgcgtctccgagacatctccaaggcatgaaacctcttgagcgacccaattgcctactcaacagccggctatcgactcatttgtgttatggtagtctatcgattgatgattgtctggaacatccaatctgcggtggaactcagccgtgcaccaagccaatatcatgggaagtgagaatcgggagaacgagagtatagatatcagatagagcatatcactggagcgcgtgcgagctgaccctgcaagaaggtatccagatctgcgaacggcttgatcgatgtacaaacgaagccagtatagacgaggtctcgtatggtattctgtgaaccagcctttgacctagtctcgctgtgttaaagtcgcccacttggcgcccggcctacatgttctcctccatcgccacctctccctttcccttaccttccaaaccctcctgataccctatcctctgactcgcttcgaatgcagcgacgttcgcggcttgctcctccttaagtctcgcgaaattcttctcggcgacccagttgaatggcgaattcgaagcgaacaacaaatccatctcttcgagagtacgctgattagattccgggtagaacgcccaaacaaatggtatggagatgacgttggcgatcccaaacaaatagtacgtcttttcgccaatcttctcgaaacacacgggcagcaacaaggtctgcaatgcaacacgacgtcagtcccgagcccactctcgacccggagctgtaactcaccaaccacccgtttccgatactccaccccaccaccccccaagcgtttcccttggcccttaccgcaagaggaaatatctctgccgggtaaagccatggcactgtcaaccatgtggccccaaatgttgcagtaaaaacgaaaatcatgctagccgccccgatcccataactggtggtcgccttggcgtttccggctgcgtctgcgtccaatcccaacctcgaaaacgctccagccaggaacatcgcgattccctggacagccgatccccaaaacaacgtataacgacgtccaattcgatccagagtgaacacgcagataagtgtggcgaactgcagaaaagaaacgcacttgagatgatgaggaaccgatttaggccgttgcctacccaccatgtaagtgatgttattcaaccccgaaatccactgcgatttctcggtatcaaacccggccaacctaaagatcgtcggtgcgtctgccgaaagcaacccgtcaacaatcgacaaacagccctattcgccacggcgacacccacagatagtaacgccagcgattccgacccattcttgaaatatctgaagccagattaccagctgcactcgacgtccgatatgcaggtcatttttcttggaccccaccaacatgctcatgtacgaggttgggacgtcgtcactaagctccaactcggccaccgcttgaatctccctcaactccgtctcagcgcgtgctccctcttcaccacgaagtctaccgagaatgtatcgagcctcgtcgactctgccttgcttaaccaaccaacgaggtgactcggggaaaaaccagacgccggccagcaagacgaataagggaataagttggaacgccacggggaacctccaccgaataggactgagtcctccgtcgatgaaggaaaggccactgtgcgtgcaaagggttaatccatccatagccggtcgtaaccgaacagacgggcgacttacaactctagccagtaagccacgacgactccgaagatgttcagcgtgaattcgatagcgatgaactacactcgcgagttgattgagaccaggtcgaggcataccccgtcacggactgctgcacaactcacctgcccacgagacgtatgctcagctgtctccgtcgcatagaccggcactactgcatttaaaccgccggtcccgaatccattactgaaagcatgcgaagggtaaattatagatcctactcggaataaccttaaagtcagggttaggggttaggggttaggggcctaacccctaacccctaaccccgtcaaaaacctcacgctcagaaattccgaggtggtctggcttggcgagcatagcagcctcagcaacgcgatctgggcacgaggatgcgaaaacctcagagtcgacccagcgggcaaagctgcgaggcagggaatccctgacaatgatatcaacgaggctcactttgacatcatctcggtcaaagggatatctgccgaatacgatcaaaaagtctagatctaggtagacgaataatggacctgaaccgatacattgcttttgacctgtgccgagactcggagaatcatacgtagacattcgcaatgccccatttgctccaatttgagcagactgatcttcgatcaccatgcgacatgcttcacctcatcaactcgatcatttgttgacgttcagctcgtccgatcttttggagaaaccgttccaacgcaaaacgatatatgatgaccgcgctttgagataatcacaactcgaggccccgaaccgtacttgtcgctctgcccgaacttcccgtcgttcaggttgccctagcttcgccatattcctttcacctgtctcacagaccgttgcctcgcctcgtgtgtcttgtgatagtccaggtgccccaatctacaaacactggccgaaaacgacacggcaccgatgactagacaactggagatcagtgagaaccataatcgtccgctcggcatccgacacctctaaacgttggtctccgttcgtgtcacctccagcaacaaattctgctcatatcgtccgtccacagcgacacgatccaagctggtctgaagacgtacaagatgtcccgctctccatcctggacaacacctgtgccaagtttgccaggtcatgtgcggtgaatggggggaactccatcacgtcctcgacattagactgagcccggtcgacctcttttttcccagacttggatatatgacgccccgtcagattcgagacatcttgacaaagacaccctgctcacctcgttccaacgagtcacttcgctgtactcgttctgggctggtcaactgcattggaccgaatatgatccagctcggggtcatcaacaccgattcggtcgactcgccttgaaatacggcgggcacccagaagactatccgggattccccataacttttgtcgacaccacgacggcaatggatgacatcttaccctcaacgcagcctgccgtatgggctgtcgacgaacagtttccagcaaccgacttgatacccgacaccgaggtagctttgcaggattctcgtaccgtccaaggattaccaaacttgaccgtccgggtgacccattttgcctgcggtgggatagccattggaatcaagatgacacattcgttggcagatgcgacgtcgttggttgggttcatgcacgattgggcgagcatccactcttcactcgtcggttcggcgagaaagggaaattcggtcgacccggttgtcatctttgacccatcgctagtcgactccaaagcgttgggcaatctatcctcgccggacggaccagacgacaaactcctcgacatctcccggtctctaccactgcatcgctacgactggctcgtttcgggtggaggagattgccccgcctgggctgaaccgatcacgacgtgccccctcgacgtcgacctcgagaccgatcacaaccgggcaagaggagacaggatgccgtggaacgaatggaacacggtaatgccagtgcgtcataccatattccggttcagcccagacgaagtgaacgagatctggaaagccagttcgaccgacacccacgggaacgcggtccgactgagtcgactggacgctctattggctcacgtctggaaagccgtcatgcgagccaatcgaattggtgaacaagagacttcgttcctggacgtgacgttcggtatgcgatcccgtctggggctgccggtccgattcctcggatcgcctttacgtcagatcgccgtcactggatctccagctgaaccgctaccaaccttagccgactcgattcgatcgaccctgacacggctggacgatcccgaggcttgtgcagcattacttcacgaccttgcatacgacacgacgggtcagaacatctgggctaccttccttggtcgacgacacttgttgtgtacaagctggacacgtttgggagtttacgacgtggactttgggtttggaatgcgaccgaaatacgtcgacgcgttcatgccggcctcggacggcttgttgcaggtcatggaagcccgtccgatggcggcacgagatccagaaaccgacgccaagtcttggtggaaagatggagccagcgtttcactgcatcttaccgaggagacgatggcgaggttgattgcggacgagacgttctggaagtttgcgtagacttagacacgctcgactggagctcgtcgagtcggcagatagttaattgaataattcactatctttttggggatttactccccgagtatctcattgctactacgacccatgcgtggtcactccgtctggggacgatctcggcaccatctcctctgccgcaattatcagccttaccgccgccgcttccaacccatccaaactgttggtctctccttgccctgctgttccctctgctcccattcctaatttgataaatcatcctctaccgacttcggctcgctacgatctcgaaggattagtttctgaaggggcggcaaaattcgcgccagtgattctcgaccgctctcgtcgtattgctcgcggtcagctcctctgacttggcgaggagcatcacggagctgggtccccccccgcgagtgccctcgattgaaagctggaggatgaggtagatacggccggcaatgtgagagtgtttgggagtggcgaccaggtacgaaagtgcccggacgacatctccgatgtggttgatctagagtggagtcaagccgagtcgcggacggaatccccgtcgagcattcgcgagacgatatccatggaaatcgccaacaccgtctcttagctcgttcacggtcacatcaacctccatccagaaagttgaatgctccgaagtgatctcgtaacctcgtcgattgcacttcggccgttgtctcgattcaggtccccgccgagccccgcaccgatcaactcaccgactgaaccagcttggtgtcgcgctaaacctgaatgtcgagttgctatttcgatcgattctgtctcgagacgagggatatataaaggtcgatcctcttgctgccaccaattccatgtctgtagagaaggcgagcaagaggtacaaatccgtccgaccaagtcatgctcaacaatcgccaacccgtccttaccgggctctcggcgttggccctcgtcgcgggagtccacgccaacaacgacggggcgccgggttcaaaccgggacacctccttgacgtttctctaccagaacaacctcaacctgactgacgatgtcaatcacatcggagcgattctattggcgccaatgacggtcgaccgaggcacgtcggcttgtaccaacttggctgaatcgcttttgaactcgacggccatcaagcagcacgcgcaggatttccaaaacctgcttgcctacaatgagtacgctggtaaggtttcgtccaaccaatcttacctgatcgccgacgggtacgtgagatttgatggaggcgccgcggacaagctcgtctaccagatcaacggagaacagtccaccgcggcccccgttttatgcacccaatccgacgagcaaaactaccccaatgccaccgcaacggccgccaacaacgtcacggtagtgtctcaaaacaactcgttcctcggattccgtaatcaaaagtcgttccgtttcgtaggtatcccttatgcggacccacccgagcgttttgaatactcgcgtttgtccaccaagacgggcacgatcaacgccaccgtctatggcccgtcgtgctctcaagccaatacgaacggcacgtccgaagactgcctcttcctcaacatccaaacaccatacttgccgaaacaaggatcgagtgagggacttcggccggtccacttttggattcacggcggcggatatacgggcgggaccggggcggatcctaccagcgatggcggtcaactcgctgcgcgcgaagacattgtcgtcgttgaaatcaactatcgtctcggtaccctaggattccttgctatcccggatacaaacatcacgggcaactatggtatcgccgaccaagtcgtcgcgctcgaatgggtcaaggccaacatcgccgcttttggcggtgacccgaatcaggtgaccatcattggagaatccgccggtgctggctcggtcaaagcgctcttgagcgtaccctgcgctcagggtctgttccgtggagcggttcccatgtccaatctgggtggaggccagacgctcggtctggaaggcaactatgccaccgagtacagtttgtaccgcacgatcaacgaatcgtacacgcttgccgggcaaaacatcttcaccggagtcggctgcaacgacaccagtttggacgcccagatcgcttgtcttcagacgaccaacgcaagcacgattgccaacttgcctgcggtggcccgatacgtcgtccaggatggtgcctatatcttggcgcctacgctcaacgtttacaataacaacgggtcgacagccaacgtcaataccatctggggtgtgacggccaacgacggatcgtcattctcgacctaccccaagtctcctgtagccaacttatccgagggcttgcaagtgggacttggcatcgacgcctactacgcccagagcatcatcgactcgggcttattcccgctctacgacactggcaacctcaccgccgacagcttcaacgtcacgcaacgagtcgccaccgatacgcaattccgatgcgtcgaccaggccatcgtcaacgccggagtcgcttcgggagctttcaagcagagttatttttaccagatggaccggacttattcgggctacaaccccaacaacatcgatgggaccggtccgattgaacctgggtatccttatggaaaccccaacgttccctattaccgacttcacggatccgacatgccctgggtatttgtgagtccgcccgacgtcgcgacagtctctttgccatagctgatcttgctggacttgttcagggcacgctgacgaccctgagagacgccaacgatctcgcctcgatccaactcgccagcagttactttgccagctttgtccgttcatcggatcccaaccctgacccggcttatctccaagcccgaggatacgacacgactgtcgctgcagtctccaccagcgggacgtgggagccagtctctggtgcgaccgggccgattcgaatcatcgacgtcaacgcgaccacggccactttccaggaactggagcagtgtgcgttcttgaactattcaatatcgttctaccagtaggcatgagggacgtcccatgtggatacatgtcgtccaccttataattcctccaagcttggttgtacctatgccaactcatggccgcgatgtaaaaaagcaaattgcggtatatactggatcctcagcgagcagctcgagctgactgaaggtcgagatgcgtcctggttttataatcatgctcgaaggactggcaaagttcttgtgctctgtgatttgtgcacccgcgcatgtcccgctttcattgacagattctcctgttcgtatcgacgggcacctcgagatactatttctgcttgacctgctgagctttcttcgccatggccctcttgaggtcgtatcgatccaacatgatcactttgcgaatgaccaatgtctcgccatcagtacaggcgtccgcttcgatgccattcgatcgcgactcactcgtgggctgtatcaatgcccatcccagttcggccatgccgaccatgatgatcaagaatacttcgtgtccgttccgcgtatccttgattacgccgtcctggaccctgagcttagccaacatgctgtacgccgacccgaaacagacgatcaagacgaaaaacatttcagtcttcatcaggtcgacctttgaagcttcctgtcctcccatccgtcgtatgatgaacgacgagttggagcaaaggatcgcttggacgcccaggacggctgcacaaaagatatatggcttgggaggcaatacggcaccacacatgtaggcgaacaaggtgtaggctccggcggtcgccaggcaaaggagcgtcgtccgggtcgtcacgttcatgattcctggctagatagtttaagcggcagacggtagccagactttgtcaagaggtgaagaaccttcacagatcttacccggtcataggcgttgtgcacaagagagagaagacacgaatagacgaccacgatcacctcgggagttgtgttgggtgtgccagcgtgtgattcctccgctttcggccaaatccgaacttctcggcgaattggcctctatcgttcggcatttgcagcgcgacagaactcgagagtacagtctgcaatgtcgctgagctattctccactcgctcatggctgtcatgtttgaagtctgtggagcccggtggtgggatttccatctcgcaaatggtgcaaccgagtatattgcttcatcagaaatcgccgaggttgataacctaatttcacataccaccttccttggtcgcagcgcaatgattccagcttcgctagtagagacacaaacgaattagatcggactgccggtagtgcgacagagttggggcgcttcggatcatgtgttcatcgtgcgactacgttctgcgagacaaaaactcgtcgtaaggaaggtagacctgcacttggcggacaatgcctaccccaaagacgtttgtatacccaactcctcggctctgcagccgcgcttggcgtaacgacttttgtccatgatgattgctctatccgacatgggaatactgtatctcagagagctcgtgtgcgtctcgccgctccacaaacttataaaaggatagggtctacgaatgcccgaacccggccaacgtcgcgcgctaggacgagttcggtgttgcgcaagttcggtatgggatgcgcttggcgatccccagtcacgacatgaaactccttgtctcgcccatcatgtgttgaaagtgtggattagggaactgccgagcgtgaggggccatgatagtaggaccatatataatgtgttgaggaggcggtgccgtcgacatcggaataaccgtgtctcccgactctgacgcactctttgcatatccactatgattcaatcgcgaccgcttctattccccctgctcgtcttcctgagtgcaatccttcactgtgttgccggttttggttttcaaccaccacccaagacggcaagtctcactgtcgcatagcgcagacgagttcgccctatgggatctcgccactgacatttgacggccgacatttaggacggtaacggtcaagtgacggacaagcttgtactgtacacggcgatagttatacgttcagatggctcgacctctccgacggcagcttgactttgaagtacgtgtcaacgatctactctccgtgttacgccgaggcgctgaccagatacctgatacgccagtacccgaacgctctatccggagaacaatgctattaacgatgtcgtaagtccggtctcggtgtgctgtagggctacgcccttgactcaagctcactttccactccgtctgtagggacggatgatcgaaacgtcgatcgatacgtcctcacttccaggcggctactacaattacacccacacagtcatcgaaccaatcggatccaacctgtaagatcgcgtatggcgagcaccagaagtatggcctatccgagcctgaccttgtcagcacttctcggtagcactttcgcattgttaatgggaccactcggaccacaaagtcccggtcataccgcgacatataccgtcgtcgagcgggatgaggacaaagcgagccaaggtcctccgtaagtcgttcaacgagggccgacccgcacacagttcagctgatcgaatcgttgctgtttagttccgccgcgtggtgggctgtagctgtaagcgtgcttgtcgtgtccgtctcgatcttgtgattttgaatcgacgtgtatcgaaccgataccaaaggaatccggaaaccaattcgcgcagctggctggaccttcgttacaccatgttccagactctctcactttcctccagatttggctcaagacggcgatcaattccggtcttttcccaccaagttcggcattcgccatagggtacttgttcacgttacacgacgtgatctcaacgacgggaggctctacaaagaggatgcctgccatacctacactgtcgtgtatcattaattgttaccagtccccatatgggcctttcggtgcgaacggcaggactgccaaaatcaatccagactgccgaagtaacctgccctgccggcgcgccaagtagttggctcggactgggtattcgcttgacaacttgcgagtcaactgtggcatatgccggggatcatatgctcaaaatcgtaggagcttaacgatgtgcctcggaggagctagagaggggactaaatttgagacgtcatatgaaattgaccaaagatgcagtaaacttacgggtacctgaactctggattgcagggtgtcatgctcacgagtcagcaatcttcggcgcaccggagcagacacaaaggctacgaggaacggtgaacaaagaaaaaaggaagcttccacgagattagatatgtcattttcccacgtcatcgagatatacaagctctgtgctgtcaaacatttttctgtattaattctgaggcatctcaacgttttcatttgttttgttaatctttggatgattgaggacccatacatccaaacaggaatcacagagcacgttccaccgatcagccagccattgattggcttacttcgtgagtctgactgcccagccatcgttcgcgttatcggcattgaatgtcacagtagcggagtttccgctgacgggaacattgagtgtcttcgctgtcgtccagccagtgaccgctccaccgttgttgtaggggatccggatgattgtccctttgagcgacgtagcacttccgaactgtgagttgacgctgttgaagacgacgttcacagttcccgtatagccttgactcccgatcaaggcagtagcgttgccattcccggcggtagcgtacgcgtcgaccgaattaccagccgttgtttgacaaggcgaattgttcatgtcggcataatacttccagacctgataatcacccgtggtggagtacgatccatcggaattctcgatgagaagctgggccatgaggtcattgagctgtgagcccgatgcccaattccctcggagactgtgagttgaacgagttagcggaagacatgaagccaatctcccctctagtgcggcgactcacccattgaatttgaccctctcgaatcgtgccttgaaccaagcttgccacgacgggacttgttgagagcgaatcgagtactcagagatttggtagccgatcccattgttcaggccgtaaccaggtagccaagagttgagatactgcgacgagtaaataggatcattgttgttgtcttcctcaagatgccatgtccagacatcaggttgaacagcggttcccccgttgttctggatataagtagccaagctttgccaccagccatttgatggatccggtcgagtcgctgtagcaggaccattgatgggaaggaagttggggccgctcttcgggaacgccgcacgcagagccttcgtacagcgaacaaacgcctcgttgaattgcgcttgcggtcgaccgccgaagttgatatcgggctcgttccagcactcgagctgcgtggtataggcgttggccattccgttggctttgacatcggtaacgatctgctgaaggaacgaggtccatttggaccagtcgccgttgtcaccagggaacgggaagttgtttccagtggtctcatcggcaccccaaagatcggccagcttgagcgcaaacactccgttgcgagctctgttcatcgagagcgagaattaggaatgattgtcgctatagccaaaagctcaaattctctttctctcacctgatacgcttccatgcagtcaccgaggtgctaaatcggtagttgtagtcgttcatgttcacagcatatcccccaggagacgggctgacttgagctcccccagctgcttcgtagttaatcttgaggtcatcgagataagattgaggaggcgtgttggcatcgaccccgagaccgtaaaggatgccctgcgcgtataattgaggcgagccggaacaggtgttgagcgagatggtggtggtgtctcccgcgcgcttggagaggtcgacggattcagtgggcaatccaagcacagcgggactgtatgccaagagcgacaagatcgtggcgcaagatgcagcttgaagcttcatggttgtggatctgttgcttgtggatgtcgagcgatgttggcaatgatgaagtgatagtgaagagcgttattctgattgaagcgatatgacggaacacttgcactgaggcctcgcttatatatccagacatccggataggtgcgaccgagagctcgcggacaatacttcaacgaaagagccgctgcagccaaacatccaaagtttctacgttcgtatgtcactgtacaatgaaacagctagcggagtattttcggagcccctcgtcgttatgacggagtcacgaccgtcggtagggccattcttggtgaaatgactaactatgtccgtagcagctgaattacggaaatagattgactagcgggggcagtccaagtaggagattgaatgacggggtagatcctagtggaaagcaatatcatcgaatgacatgaaaggctcggtttcagatgtcggtcttactgtctcgcgcgctaacgaggcacaagtcagctgacgcttgttcgaggtctatatcgagcgatatgctaagtgtcaagtccatgttgggactcggctgtactcgttgagaagacccgaacggagctccacgggggataaggcgtttctgtctagcggcgtggatctaggcgatatacgagacgaggccctgatctcggcttgcgccattgtcgagtgggacgaggccaacgcgaggcagggtcgtcagtgaacgtaagggttgaccaggctcgtccgtccttagctccgccggatggtgaatcgcatgcgtactcgtcgtatcgttctcgttcatcgtgactcgacttgcgctcactttctcaacaagacgctggccatcaactcgtgtacctatggcatggctcggtacttctcttgacttttgctgttgtgccagaaggtccggcatgtgcggctaatctgtggtgagcagtagctctggcgtctcataattcaagcctgagctatccttctcccaagactcagagacgagaccgaccgcgatgacaattggtggtcagcatgctcggctggccttgcccctgtcccgctgagatatttcgaatccgactcctaagggaacgtctccagcttgagaaagacctcggtgcggatcgacttgatgaaaacgttcctcgatcctcctgccaaggaacgcccgtactcttgtctgcatgctatggcgatgtgggctcgccatcagccgacccaaacagcacgaggaggaccaagaactcacatccagccgtatgattgcctattctaacgatcgcgtcccatctttctcacagactggtgtcacagtgcctcctttgtcgcgagtctcttttcgtttcacccttcgtctcgctcggtcgagacgcctataagaataggcacgcagtcaccgcgaccatccgaactgccaacgttccgatcgcagatttttccgtatccctcacccttcgtcggcacctgatccgagcctcctcatcagaatcttcccgagcaatggcctttttgcttcctccgctcgccgccttgccgtttatcgactcggctttcgagtcgactggcaaccctgtcgctaaaggtgaacccggtcccctgctgcgaccccggtcgcccgctggagtgcagctcatcgatgccaaaagacggcggtcccatccgctaacagacggctagatcatcccgctgttgacggggctacggttccgtatgaggaggagaacgtgcgggatggtcaatgaaagctgttgtgtggggtcaagttcattggctggcgacgcgattttgctgagatgcgatgacaatcacagagatgtactcgtcgtcgttggcatcaatgtccagttatctcgcatctcatcgtcgccgtcgtcgttgttatggttgtcgttatcgtcgcgttatggcgttggctatacaacaatcgttcccccgcaggtatacaaaaacctgaaccccgtcgagcgtcagcttctcgtcgtgactgtcgaccttctcaagctcgactcgcccactcactctgtctatttccacaaacgaaccccccataaatctaccctggcccgcgagtgctacttggcttcccccatctttccaatggcttcgaggttgtagacgacgttcctgctatagtttgaaaagagagacgaggcgacctgggtggacggggcgtgcgctttgatgctttcctacgggtcacgaatcgatgacgagcgagagaatcgagtcgtcagtacgaaccccgagcatccaagtctggcgaattgagggacgaggtgatacggacgttcaagcaaatgttgagttcggcgatggcttcgtggcatttttcgacgtttttcccgatcctctcgagcaggatggcttgacgagcttcgtgtgggttctccatagaagacatggtcggtcactaagtggtttgtcgttgtgggtgtgaatcgagggcttggtcgatgaatcgatgttgtatgttgttgttgtttatctacttgtttcgactagtagctagttgactgttcgtgtctcgtttctagtccaggtgacgccgaatcgattggggtgaaaagcagcggggtatcctagtccgctcaacttgggtgtcagctagtgctctatggtggactgtagctctagggtggactgtatgtatccaaagacctggaggttgtttgtaccaaggttgagtgcaagtcgtgtttctccatcgattcccggccgaaagcgcgtcaaagtcgaatccgaaaactcaaagtagacgagataaccaccaaagacatcatccatcttcagcaacatcgtatcctatcatttaccacccgcgacacatctccggtgagatcagcaagacactgcgcatagccgccgctcgtaccccgggctaccatgtggaccgcgatctccacggccatcccgtggccttcaacatggaccaaggagaacgtctcgtctgccatgggcatgatcagtatcgcatgttgggtcgtagcacaagctccgtgagtgatcaatacaggcagaacggcggaatgggcgtctacctctcgagtcccaatggtatttaccagccgcttattcgaaagctgactctgttgtcgacgtcgctttcgtatgatagtcaattctgggaaaactacgtctcgcaatcatgtgaaggattagcttttccctttctcgtcaactggttggcaggtgattcggctccttctgttgtgagaagacctttttgacatggtgtctggagctaacagacgtaatcatgcgtgaaccgactcggttgtaggtgacatcaccaacctggtaggctgcatcttgaccgatcagaaagagtttcaggtaagaccttgcttcgcagctctgtctacgactctcgtcgaggaacgtactgataaccgacatcgttgccctcccgcacccctcgttagaccttgctggcggcctacttttgcctgatcgacctggtcctcaccggtcaatacatctactactcccgcccacgtccccgttcgacgcctaccgacacaccgagtgaatcggacgaccacctcgcctcgtccaccaccgacgtccgcacctcgtcttcccgtcccctgaccttgccccggagccggagcgatcaacgcctgcttcaatcgccctcggagagcttgaccgaggccgctctcgaagtcgctcttgctgccgaacgggtcgaacgcagtcgatcccgtcgtcgatacggctccgagtcgcgttcccgaggtcccgcgacgacgacgacggtctcggcggatcggagctccaggttactcggggacggtcacctcgctgaacgtccggcggatcaagcgggaccgtactcgtcctcctccacccgggaacagagccaaacttctagcccacgagcgacgatcaagggcaagggcgctctaggtctttcgacgtcgccctcggtcaaattcggacaggacgatcgaggtcgacacgaggccatcccttcgggcgagacgtcgggcatgggggaacgacgttccagtcgaccgaggagttcgagcaggatgcgttcttctggggataaacccgctcgacatccgggtcagacggccgctggggtggtattcatgggggtctgggcgttggcggggttgaattggcgaatgggaggacggtcggcgagtcgagacgttggagcggtgaatagggagggggccgtcatctctcctcgctggacggggcaggtcggtgaccaagcagggttgaatggaccaaccgggtcgacggggaatgacatcttagaactctactttgctttcccatcgacctcgatgacgacgacgacgacgacgacgacgacggaggatgacgaccatccgacgcacagacggtgggacaaggcggccgtccagcggctgatcggaaggatgtcggcgtggatctgtaccacattgtacttgaccagtcggttaccacagatctggaagaacgtgagtgcagcgtcgaggataatgtcgtttcacgcttgcgtgccacgaggctgatgagcggagacgaatgcagtatcaacggaaatccgtagaagggctgtcgatcatgctcttcgtgttcgccttttgtggcaatctcacctacgtcctttcgatcgtcttgaaccctacgggaagcgacggcgaaagcaatccagacatggtagggtactacctgctcgaagctttgccgtgagtgttccccggatcggggtgccgcccgacctcgcagctcatccgaataacccccgcagctacctactcggctctggcgggacgctcatattcgacctgaccatcatggtgcagtcgatcatctacggctcggcacctccgatcgatgagcgagatcaggaagactatatcgaaccacctcatcatcaccaccggtcgcgaagttctcgacgacatagcaagcgaatcacggatgaagagagcagaccgttgatcgagcggccggatgaagactagcctagtgatgagagatcgctaacgaccaatttgtataatataatacatgcattcgagaatagcgcatgatgggtatgtcgctgtatcattacgtggactgatgacttgtccgtcttcactcctagactcattagatcctgcccagcccggcggtaatggccagaaatagttccttgccgcaggactgcttcttcggtctgttggttgacgtgccggcgactacctctttgacgaggaggacgccggctttcttaactttacagggcttcaacgcaagcgtgtctttgccagtgacactttttgcagagtatttgcgtacggattggaccagcccagtttatgaaaaaggcgagatcaggagaagatgttggctggcttcgacttcgctggaccggccgttgcgtggcaagttgcccccgcgttggcatgtcatgagacgtgagagcccgtcctcacagatcccgttcccgagcgtgactggtctctcgcagtcggtacgtgtccagcctcgcctctgggtcatccttgttccagcgttccttgcatgcctccaaggcgagtgaaggtggtcccaattgctggatagcaaacgaagccgcgacggatccccatcgggcggctaacgggtgaacggttgtcaggcttccatgtgggaatggtgtaaaacgttggctcgcactgaccttcaacgagacttttccccccggtccgatccatcccagcgacaagcccaccgaggaacgcgttccccccgccggtcacatccacgacctgcttctggtcggaggctgagccggcgaaatacgctggcagccgtgtcgtttcgcttgcggtgaacaccatacaacccttcgccccacatcggatgaccacgcccctctgccagcctcgccgactttgagcctgctcgtacccccgcatatccgccaataattgccgcccgacctcttccagcgcctcttgcaccttgtcgccgagcaacagatcgagttcggcgtcgctcgtgttcggactcgctattcgcccgcagagggagagcgcttcgacgtggttgggcgaaaagacggtcattcggggcatcaaacggcgatgatcttcgtactctgccgagttgcagttcatctgccagatcgcacgaggggcaaacatgcgggtcagggtgaaactcggctagaccgtccgtcattcctcccagggctcacggggaacggttcccaaatcaactcgggcttccacccatgttcatctccgcgctgctggagctcctcatctatccgatcgagctgatccgcgatcgcccgtgtccgaggaggagccgaagggaagtgcatcgaccctggtcgaggcgacgcaaagaaccgttcagccttgacaatatcatccggatagatcctgatagccggtgtcaagaattcgaaactgtcgttggaggcaccatatgcgatgagctcgtccgccgttctgctctgtccctgcttcgaccgacccgactcactctctagcttcgtccctgaacgtgttcaacgccctcgtcgtcccacaaccatcgtctctcgacttgaactcccacatctcctcgccataccgcagtaacctgtggtatatctcccggtcttcatccttgtctgtctcgaggtggacgacctggccgagccggtgtggtggtagaaagacgcgtgcgccgaggatgtctgctcgtcgagaggtcttgtgcgatcagatcgaggtgcctttcgagagaaggctctacaaggtaggtcgactgacaataagtacctgctcctccaacctatcgatcgatcgagagcttcaaatcagtgttcagaaccgatttcttcgccgggatcatccacgcgatcatcgaggcccaacgtacttgttgagaattccgtttcgacgtgtcatccttgccgtccttgtcgaggtacttaaattcatcgatgacgaacatgcctgtctccgagatcaacatcaaggtgagtcttcattctccgaatgacggtctggcaaaggagagcaagatggactcgcccaaggtgacattccgcggcatcgtcctcgaggtcatgtcgactgggttcgatatgtcgtgcccctaaggtccgtcgtcagggatgagctgatcctgattccaggccttggagcttgtcgagcgtggtcagttctccgagaccgatttaccagagggacgggactgaatggtatgtaatcagacatgtcatcgattcaagtcgcaacgaaatgacactttcgagctctttgaagatgacgaatcgcgaaaatcgagatgaacaaggtcgaaaagttcagtcgttcatcccagtaggccaagagctagtagctagccggttgaacagaatcgaatcggaggcttgggatcattcacagaacatttgctctcatgaggctggtatgatatggtgaaattcgttgattcagtcaacatggtcgaacacggcctcacggcggtcgtcatctgtcaccctgcctgtcagcgagcgtgctgaaacggttcatagacagcaatcaacatggcagtcgagtgcgtcgtcatgtcgaccggctcaccactttaaccccgtgtggcaccagcactcacttctgatcattgcttccaagacacggggcgatacattgacacgactgcgaacacgtcgaggccggaggatttccctctccttgaccttgcgtttcgtttcgtctcttccggcaagtcgtacgacgactatccccactccgctcaacgccgactatcgaccatgtcaggtacccaagacggcgtgaacagtcttgtaacccccgcactttcccggagtaatcccttagtatgtagacctctctttcgtcgtgctcggatgatttcccttttcctcccgcaaacattccgactcgatattcaattcggtttcgcgctaaggaagacgagttgaaggatattctagcgcaaaccccgctcgtgaacctcgactttgaacgacgaacgactggacgtcatgaattcgtccgggattcattaccccggcttagcccggagcaccacatgatgggttcattccagacgattcgtgccaagacttcgtaacacatccgaatctcgacccccgcctctgcgccggcgtaaagaaggacgcaggagatgttcctgtaccacactcgactgacgacccggcctcgaaattatcgcccgatgttataccggagaagcctgcgaatgactatataatcggatcaaagtttgttccaacgataggacctagacgatcgcatcctgaaggcatattccgccatacccgtctcgacgtgaccaccgatcatgttcatctcgaccctcttgaccaccgcgttagcgctttccactgccgctttcgccgcacccgctaataacggcaatggcaacgccaacggacacgacaaggacaagaagggcaagcatgacaagaacaacgggacttgtcccttgaccgccgtcgatccggtcgaattcccctacccgagtgagtcgggttgggcagatcgaggtctttccccagacaactcgcatgtctaaccttgcgcctcgctcccttgaaaaacgtcgccgactcaagacgagattcacggagatattcaactcattcacgacccttcggtggccaaggttaacgggacttactacctctactctaccggcaagtcccctcgcgcttccgccctgtcgtcacgacaagacccagctcataacctctcgcgtcatatgtataccgggactcttttcaggcgagggtattcccatccgtaaatccaaggacaggatcaactgggagtttgccggtttcgtcttccccgaaggtgccccctcggtcacggacgcgtacacgaacacgaccaacggttccctctgggcgcctgacgtggtcagtcgccgcactcttcatactttgatgacctcgatcgtccagcctgctgatcaccacatctactcgaatttcggcgcggcatcacacagtcttaccatccggagagcaaccagttcgtcctttactattcggccagttcgttcgggtctcccatctcgggcattttcctggctacttcgcccactggagaacccggttcgtttacccagtaagtcttcgtaccggatccgacgtttcaaagccaagatcggttggctgaaacgacatgcctgggactctgcgtctttgcacagacaaggcctcgtcgtcgaatcgtccccggccaaagatccttacaacgcgatcgacgccaatctggtttacaatgggacctcttggcacctctcttgggggtcttggtggaaaggcaagcctcggattcatcagtcgtcccttctctgattccccctgaccgtgatggcatctctccctatacagggctttacatgaccgaagtcgactctacgacgttcatgcccgtctccaagaacacgtcggaatacgtcctcctcagctcccggccgtcgaccttgccgatcgggttgaactggggtggcgagaacggtagcgaaggggtacgtcttgcccggcccggaaccagagtagactagcccgatttgagcatcatttgctgacccttgagttgctggttgtagccctacgtcatcaagtacggttgctacttctaccttttctccgcctgggaccggtcagtctagttcgatccgtcctcggcatctcctgattcgccagctgacatgatgctaccgaacccaatctcaacatgcgctccgactagatgctgcgccggtctcgactctacttacaagatcgtcgtctcccgttcgctcaatgtcaacggaccttatgtcgacaaacagggcaccctcgccactgctggaggtggaagcgtcagtgagtgacgccgagctgcgattgtctctgcagagtcggctctaacgagatctgatcggacgaactactacctcgccccagtcttgagctctcatggcagcatcgttggaccgggccacatggcagttcacgaggaagaggaaggtgtctacatgtagtgggtcttcagccgctcagctagccgtataaacgacacggtggcgctcgcgatgctgaaccattctatatcgcagctaccatcactatacagctgaaaatttcgagttgggtatcaacaagctcgacttttcgaccggatggccagtggttgtctaaaacagatctagctaaagcggagacacaaggtcgacgccatagacactggctttggtcgacaacacattacaaggaaatcatcgagtcgtaaatatgttcttctaggcgtatgcaatcgtaatctcgttcggaaatcattctctcgttaaattctttggttatctagacctcgccggtctctttctttggtcctgggaagaccgcgcacggccagattgaacgctagcaatgtcgacagatctcgcttcaaagaccactggattccccactccgactgggcatcgtgtatcgggtttggtatcaatgttgaggcaaaggtcgatcgcctttgctctgttgacctggacctatggttgagttggtaggttccgcagcctggctctgtgacgagctggaaattcgtggagtttcgggctgcccaagcggcatttgattgattgcagtggcggggatactagtctcgacagcatctcggcctcacatttgagcgtgatacggctcaagaaagtccagcatgagcttatcgcacgcgtcgaagctcgattgctcttcgtcactgcatcggtcggtcgatggaaggccccgcaccttcctttgagtatttctgattttggcgacgaggtttccgatcagggtagcccattctttggacccattcgcttcagcgatctatgaaaaagttacgcgtgggttgtagctctgcgtcatgcccgtacacatccggagctagacctacgggtcgtacagtgctccagatgctacgttttgtattgacctggtctagcccaccaaccggataaagtggaccacactgtagaccttcggcttctgcctttcgactagcaacctaatgaaaacggaattcgccgactgatcagttacgaggcgatcggaggcaggcaagatcttgaaatcgtgcgaaggacaatgctacctaccacccaaagccacgtgtatatcgcggattcacagtcatcaatgaaattgtggcttcgtcttgcgatctcgtcctccttttcagagatgtcaagccgattattctctcgctctgtctcgtgtaggccagttaatttctcccgttctgcttcactcgcagcggccaactctttcttgtgttgctcttccctggcctgttcggcgcatttgagtatggttaggctgatatgttgttcacgggactcctggacgtgaagcgacatgaatagcaaatttccagatatgcaatcgtccagactggtttgccaaagcttgggttcctcgcgcctcttatcaccacgccgtcgcttcccgatgcgagcaaagtcaagatcggcgaggagacaggtcagagtttgtgggtcgcacaatatgttgcccaggttgaggtctctgtagtgaactcctagcatggctagatgtttcaggttcttgaaaagcttgcgataaatctccaccatctcgtattcattcaactgacagcgatggatcggtttcgcccgccggcacttcgtgacaagcaccgtaaagtggactttttcgaacttgccttccggatcctcatccaagggatctaggtggaccggtctcgtcgcccaatcgacgagcgccttgtcgccaatgcaggcgagcttggtcttcgcttggtgtttttccgacaagatgccaaccagcgaaggaatggctacctcggggtccctccgaaacccttttctcttacctaggcggcgctccatttttttgatatgcttgtaaacgtcgcgttcatgatgacgtaggtgaggaaggttccacgaggtcttgatgatcagatgctcgtcctcctcgagtagaatttcgggagggatattgtcttcgacctgaatggtgcgggcgagaccagcagaccagactgccgtacgacgtccaaacggatcataccgcgtgtcgatggacttgacgtccttcatctcgatcacaaatggtcggcctttagtcgtttccatctggagtctgcctttgggaccggcgacgggttgccagtggggtagataattttcgacgggtccagagaatacggcgaaagctttgacaatgtcgtagtagtcctcgggatcttcaatggagaagcctcgactcgacccgaatcgctgggggttcaaataccatacccgcatgatgggtccgcagattgtcaagccgagaatctcccctgcggcgggaaagtgtttgagttcgttcgtctgggcacggcagcgtgaggagagatcgagggtacgatatggtaagagttcagctctgatgtcggacgatcgaatcattgcacggtggttctggcttacctgataacgatgcgtccgctcgaccagactgcatttgcaatccatgcttttttctttcttgacctccatagaaaacgtcacctgagaccagcacacgcccttctcaggcaattgctttcccttgtaacttttgttgatgatatcgggcttgttcttggctacccagcgatgcaccgtgaccttgggatcctctacctgtgccgggtgtccagaaggctgtgcagcttccgtctggggattcggtttcggtccatcgaggtcatcggtaaagtgttcatcgacctgcttgacataggtcgaaccgcgcgaatcgaagacgtcgctctcggtgggatcatgcgtctggccagtatcgtcttcgtatgagcccggacagtgtcgatggaacgccctggccaatttgttacccagggtgacgaaagcagtctgcacgttcatttctcctttatgctgaggatagaccgtcgcccttgaacgaaagtcttcgaccgcaaggtaaagatcatggccgggtcgcttcatgttctcggcaacgcttcgcagataaccgtcgtgtttgcccgcgtcgaactcgatgtaatttctatcgaatctgttgtcggcaagtttgcgcagctgtatctctacagctaccgcatcttggtgggggctgtttagcggacgacttttcagcttttgaggcgtagcgagcgaggcagccccaagctgttccgatagactcgcggaccccgattcatacgactttgctgacccgccaccgcctgaagcaacggccgaaacgatcttgtgacgcattctcagcaatttgagttcgtcgtacaggtcgggcgacttggaagcgagacgtatggcttcttcacctccgtgccagccgcattccttcttcttgtcgtcttcagtgggaaccgacaacacatcgctgacggcgattctcatgccatgcgcgcccatggcgacgagtgcttcgaggggtttgttatgtaccccaatgtacacctcgttcgggatagacacttgtggattaccgacggaaggatgacggcgttcgtggtataaaaaaagtctaattgatagaataacaatagtgtcgacctgcatgttcatattgtgacgatgattaggattgttgatgaactcggaagcaaaattcgatgccgacgacgatcgtaagtgatgttcatgggggtcacccccaccaattctacataagtgatgtatatatacgcacagctcctctacgtacatgaaagcaagacgatagagtagccgagatatgctttcccccgaatcgaacaagtccatcgacgactggagccgcccgtcaccccatgatctacctacactcacgtccctctggcttgacccaaggtgaacagcatctccttgcccttcttcttctttttcccaccaccgccgacgctacctccgattatccccgcatcctcgtcgaacgcttgatccatctgaccggccgcggtcgttccctccggtggactttgccatccggcggtcgggacgaaactcttgtcccccttcatccgacggaccatgtcgtccctcgcaaagtttggcctctccttggaattcgacgtcgcgggcaagctaggaaaggccgatttggacggtggaacgggagctcggccggatttgctcgacgagacgacaggcatgtggacggaccggaccagaggttgagcggcagatgaatagccactcccagtcgtcgtcgaggtagaggcggcgagtcgagctgccgcagaagtcgtgccggacggtgcagtcttgccacctccaccagcagagctgttgcccaatacgggaaaggcggctccggggacgacctgacctcgtccgttcatcgtcgccttgccctttgaaggctgggtcgcagcaggtctcgaggcgggcatcgaagccgccgcacgttcgaccctgtcccatacctggctggcggaaccggctgttcgagtggcctttttcgcattgagaactttgcccgaggcgatgcccgaataccccgtaccaagcgagatcggtggggtcgaagtcccggccagggtggggaattcgttttgtcgctgtgccggaatacgagccccccaaacatgagcctttgcacacttagacacgtcgtcctgctgactggaccgcgactcacatcaatcttccacgcgttgagcgcggtcaagatgccccggaccttgtcatcgtcgcccctcatcgtctcggcgatccgtttcacgaccctcaacgtgtcctcgctgtcacggttcaagacgctgtacaccgtgtccacgagatctcttgcgggggcctcgttgttcttgtacgatcggatcgcgtgacgaaacgacgacagcttggtctcggagtattccaccatcgtggccacgcgttcgagcagctcggtttgcatctcgttggtctcttccggttcatcgatcctcggcgtagccgtaccgctcgtcgacttgcccttggcggcggcggcgttggcaccaccgttggccggctcgtccgatgtcaaggcgttgccgaatccggctcgacgaccgccgcgtcgttcgtctcgaggaggttgtggtagctgttgatgctggaccgcggtggggcgagtcctcccggtctgcctcgaaaattggcccgccgattccatctggatgtgtctcggtgcgcggctagaaccttgatcgcggcccgacgctgatggcatggggttcggaggcgtaaagctaaagtcacccgacgggctcacgaaatcgatcgggagttgacgagcttggtacttgtcgcgcgatgacatggtcttgttgtgctagagcggcaagagcgcgcggggggaaagacggtcagatcgtacctccccgggtacgacgcgacgctagacccacctcggccaccatgtgcgccttccaatcgagttcagaaccaaagaccacaaacttttgatccaaacaggatttctccgtacaagggtaatgagcttggctatggaagagcgagcgagaatggacacgtaacgaggtcaacatgcaggcaagatcggtcgcaatgagtcccgggtacgtacgtgaaatgtgaagcgagttgtgtatagttgtggaagctatcggtcggtgttgacggggcatcagtcgccgagtatctggtccggacggtcgccgcattctcgacgctcactagacgtctcgtttgcccatctctttgcagacgaaacattcctcgtgcttgtgacgcatgtgtttgaacagttcgtcggaagagaaaaaggcctcgtgacaaaactagcgagtccggtgggatgtgtcagctggaaacgagtgcgtggtggaagagcgggacctggaccgtgaaactgacctcgcacattggatgaggcggtccccaactggccaccatctcttcctctttgtctcctcgaagacggggcttgcggtgaccccttgggactcggctagggtcgtgtaggggcagcaagtgcggcgggtagagcacttgctcgtgcgcaaacctggaaagttgtcttcgacatagatggcagaggacagagccgtggaccgagagggtgtgcttctcaaggttgtcccacgaggcggcttgatacgcgcaggatggcgaagggcaattgaagcggagcaagaggagcacgtcttccatctgtagacgcggggcggcggcagggggtcagcgtgccagctcgtgacggttcgaacgcgagctactcgccatgctctggctctcgaaaacgacgccgagcttttcgtcgtgaaattcgaatcgcttgacgtccaactcgccgggttcgagatccgacccgggaccctctcttggcgacgtctgggtagggaagggggtatcgattgacgaggaaaagaggagggtcgggttgacggtctgcgtagggagaacaagtaagagccatcaacgggtgtcccgggcggcggagcgagtagcgagtacgtaccttgcaaaaggtgcaatcgtttttcctacgacaccgtcgtcgtgagcatgggcgagcgggtgtacatctcgctggcaggactcacttgtagaacacccgtagacggatagcgcatacgctgtggcgggcaggggcgcaagcgaggattttcgttagtcacgggcgagcagcgggaccatagaacagcgttcgaatcggaatggacaagtcgatgcgcggtcgaagagctcggatcgagccggtagcataatgcaccaggtgaggcctgttgcgggctacggattcggacctcgcctcatggccgattgcacgcgaatgacaatgacccgcgtgcatcgcaacgaggacgagcgagtgggattcgggccggcttcaagaaggccatcagaccgtggcttgcgctttggaggtcgaattagccgggaggttgtagagagagttcccaggggatgattctcgtccacggcaagaccacgagacctttgcttttcacaactgcccagcgtgacgtggatggtcttcaggtggccggcggttggagcgggaggtgcacgagctcttccttccgagcgtgtgcgactggcttggtcatctcccggaccatcgtgaaggcgcctagtcttccacgtcgcaccgcagcgtgcaccagatgcaagaccgaggggacgtttcgatttccgccgccaagtccacaaatcaaggccgagagcctgcaaaagtaacttttctgcattgcacgaggtctgccgcaggggtttctaacctgcgccgcttcgtccagcggatcagcccgaggtcgactatgcaagccctaccggagcgctcgacggacggttgcgtttagccgagtgtttctgtgtcgaggaaccacgcaacctctttcccgacgatagacgctttctcccgagaatgagcatgtcgccgtgagttgacgaccgcacagatctccagcctacgtccctggggggcgtcccgatcttgacgctcgtctgtgcaccgggcgagtcggcaagaccgacgcggtacgtatgaatagacactgctagtgcttgcgaggtttcgtcacaggcgcgacgatctgcatcggttcttgcacctcgtctcgatcgacaggtctttatccagcttgacgtcgcttgtcctctgcccctgtggtatatccatggtgtcatgccgagtccgggtcgaacccgcctctgactctcttgtcctcgacagctcgaagctggaagctggatgcccgactaggcctcgctgcgttctcgctcgtaaagagctacgccgacgcaacgtcccctcgactcgcgttcccaccacacgcatgacccgtccccatatccgatcgttaccgagaaccacccctgatcccccgagaccgagaccgcaaccgaaacaggaacctcgacctcgacctcgacctcgactttgcatatcgacactcactgacaagtcttgtgtccgcatattccgcccgagtagtacttgaccttttcagcgcagatgaaacaggcctcttcgtcctcgtcctcgtcttcgtcatcatggtcgtcgtcgtcgtcatcgtggtcgtgatcctcgtcgtgatcggtctgatcgtccagcccgaggttatccatcgacttcgctacgtccccggcagtaccgacaacatcggcatcggcatcgacagcccctgcggcgagtcccggtggataataagccctcgtttctgtacccgctttcactccctttttcttttctaggacgatggccgtcgggcccgtcgtcgtcgctgtcgttccggatgcgcgttcacgtgtaggtcttgatgaaggtcgggtgctatcgcggtggtgggggcggttcttctgatgattttgattctgacctcgaccagagttggcgttggagtcggcatcggtggtatggagaggatcgttggtcatcctggtattaaccgtagacttcacattcccgtgcatccctcccctggccgccgccgtcctcgtcggtgcactcgatgcgatcgtagaggcatcatcgccattaacaccctgctgatcacttgaccttgcccccgactgtgcggctgggtcggttgacaatgtaccgttgaactgttgtctcctccttgccatctttcgtgttaatcttggtggtggtggtggtggtggtggtggtggtgatgatgcgatcgagatgattttctacgcgtttgacctggtttttcttcgtcagggatccagcagtgtcttttcacttgaggtacgagtgggcagttgaaggacttgctgctgatactactgtataggggtgaccgagttgtgatcgatcatcgatatcatcatcgacgtcacccaaccaacccttctgcccagctttgtccttggactctgcgcgctttcgaatcgtcgttttccccagattcaacaagcgacaggagagggtggtggtccattaactatatacaaccactactctactctactctataatcctgaccgcagcctgtacacctacatacactctgtactagcacgctcaatcatgtccggtgtaagcccactcaccccctcttgccactacccccgctaacgctgacgctgacgccgacccctgccccgaccaccagccgatcaaccccaaaccgttcctccaagacctgaccgggaaacaagtctgggctaggcttaaatgggggttggagtacaagggttacctcgtatccacagatgggtacatgaatttgcaggtcagtctcgtagagcaggacgaggaggaggcgaggatgtcatcggggtcgtctcgctgcgtctctctccctttcctcttcaccttcttctcttctcgtcttctaaatcatatcacatgctgacacctcacactcgtccacccatccattcaaccatccatccactcaaccacccaatcatccattcatcctcgtaatcgtgtcatccgcgttaaacacaaacagctagcaaacgccgaagaatggcaggacggcaagaacaacggagcgttgggagaggtctttatcaggtaagtcgattcgggtctggtcggttcgagtcggttcgagtcgggtgtgggcggggatcgtggtagtctccaccaaaagtgttgttacggaggaggaggaggatatagagaaggtgtacgacgacgacgatcgtggaccaggttggatcgatgactctagatcgtacggagagggatcgacaaccatacccttcaacctggggaatgacggtcggattgtcaactggactttgtgattcggcaagacctggactttgacgaggttcgaggcttattcctcctagaccgtcatcgacgtcgatgtcgatatcgaggaggacgcaaagaggcaggcgtggatgagttccgcatgagggggacctagcgcgatgtacgagctcgtcaacggcgggtcaggtcttgccgcggaaactcttgggatgacgaccacatctctccggaaacgatattcgatcgtcgtcctcgctcatcgtcgggcatgacggtctgggtctatcgagtacgcgacggggatcgaagagccggcgacatggccatcaacgtccgggcggacgaggcaggaccggatgcgagccagagttaccgatcgggtcgagcggggagcagcgaacttgcgcatcggtctccatcgaccatcccggactcgccttcaacgccgggaagtcgcctccccgatcgtctccctcggaatcgctcctctacgtcagcttcgatgcgtatcatcggactcggtcgacgggaggcggcggaaggtcgagagcgggtcatctgattgtcgtgcttgactcttgacgagcgacacgaccaggggcgcggccctcattgcttacgggacctattgagcgcgacgacagcgtctcaatgatattcgtcgatgagtcgcttcgctacctcctcgcgcccgtctggcgtcgctgctagccgtcactcaatccaggagtgtcaaggactgagcctcgcgaaccagggaacgaccgcacatgcacgtaaagcccacacggctagccgggacagcggcgtcgctttagtcctgggtgcagctcccgctgagaggccggtctttagggacaactcgcaatgctactcagatcgtcccaaccgcctccacccctctattgtcatcgggaggaccctgccacttccgagcacgctaggatcgcgctgggactgcgcttgttcgcccctatttccgctcggaaagaccttgatactgggaacaaattcgatcgctcgactcaaatggaacgcctcttgggaaccacccggactctccccctgacggcttttgttgtcgacttccgccgaccgttctccttgctctgcctgctatttctgccgactgcggaccacgtccttgcctatgaacgccggctgatcacacttgacccttctctttgcccaggtgtaacaacgtactgtacgttcggggagtcaaggacgacgagaggacgaccgagggaacgatggatacggattgagcgtcgctcgaatcggctcgcatccgagggcgggacgtctggggttgaaattctctcgtagcaaaaattgtctttttctcacgttcggtccggttatttacgatatcatgcttggcaaatcagtatgcatcgccgagagacgggaaatctctcgtcgagtcggatttgctgcaatgatagcacggccggtccaagcgtggtaaaagaactcggtgaaggcctgacggtcgcatcggggagatctcatcggtgctgaacattgcacaggctcttctcctgtacgctcgagctgatcaggcatggaaccagtcggtagctcctactccggcatgactggtccagtaacgacatccattgtaacagttacacccccgccagtcatcgacaggtgaaactaggcgcaggattaggattaggatgttgggcatctgcgggacaatcgcgcggcctcgcaagagcgggtatcgtgtcagaacatgcgaaatgcacctttcagccggatctatgtagatccgagacgccctgatcagcttcaaggccatattctgctggtgtctcgtgtcttaaagctgtggggtcgtcgcacctcctgctacggccaaaagctaggggaaagtaccattcgacacatagcgcgacctcatccaatacattgttcctcccagaagagaaggtttacaaaatacgtagatctttccgagacaaacatgccaaagattggacacttggcgacacaaacagactgacaaaaacgagcgtggttgtgacaatgtaagatgcgtacatgatagaaaattcctgataaattgtccgtgagctcgtccttctcttctcgaccatcaatcaagcctcgcttccgtccgctcatcgtccgggctggatgtactgagggtcaggagagagcatctctaccctctcccttccatactcgccctcgagcgtgtattcgcccccagccgacccgtgctcatactccctgctctgcctgtgcgcgtaatacgccgacgggctgactgctccctcgcgttgtggtgaaggggacctgcccctcgcatccccgttgtactgatagacgtcctgatcggtctgagagtatcgtctggatgccgccgccgtttgaggagggacgggaagcccacgaggagggtcatagtacgaacgcctcttgtcctccttggtcggggagacttcagggtcgtacgatccttgctggtagttcaaactcgccacgcctccttgttgctggtagtactgctgttgttgctgttgctggggttgataatacatttgcggggagacgggtccatacccgcccctctgcccatcctcggagaacccgagaacgggcgagtaactcccatcgggcgccttgatgtaggacgaggccctgctcctggccgcgtacttttggtaatcgatcccatcggtatcatacccgcccgtgttggactgggccatggtgcttcccggtttgcctacccaggcggagagtggtcgagcggggacgtcttccgtctgggatcgacgggctcggattcgggctcggcggatgaggtagtagacccctagtgcggcgagtgctataccggctgcgaaagtcggggaaaaggaacacgaggtttgtgatcaaagtcagtctcgctacctctaccgcattaatagctgggactctgcgactgacctgctgaacaaccggcgatgaggaggatcttgctagtggagctcagggtatcgcatttcttgccgttgctatcatacatgggaccattctgacaggttgaaagatggtggaggattgagcatactggacgaatgtctacgcgacatgggtcgaggaatgcttacggtgttaccctctcggtaggcgcaggcggtggacatcttggtgggagggttcgttaggaaggaatgcggggtgtagagctggtaacgagtgtgcttgaacactgttgggtgtgatttcaagttgtggtgaagagcgattagacagtgagaaaaggagtgtgtagtgtatcgtgaaaacgagtgtagaactgagtagagatgggcgagttgcgatgagctgactaggactcgagtttggattcgagggtcgtcgacgatgagaatcctgtgcttacagaacgttcaaagacttggcagacggtgaggggctgaacgagaacgatgttgacgcaggagagatggacgactacgaagaatgagattgacaaaatagggtgttgacagtctcgttgctcgttgggttgtctgggcgggcatactctgtctgtcccaagggtcttgtgcgatctttggtctgggcgttctgatcccggggcaattgccgatggaaatcacaacaacaacaatggagacccgcaatcgtcgacctcgtggtatcaagatcgatcggggaaagcgacagatctagtcgccgcatgggcgaggcaaggcagcaatagaaacgccacgtccgttgaactcgcacgaggattcgattcatcccgttgtctcccccttccgcctcgcctgtgatgatgtcgaactcgcgtgtttgccacttttccgtgattggatctctgatcggttgttgatcccaggaacacgcgcgggagcaattccgggtatattcaagccacaataggtcagacgatcaagtaccgcaaataacaactgtgaattggtgaactactagctgttagaggtactacagatcgagtttaatgcacatcttcaatagagctctggtaactgactggtgacatgagattgtagcggcagtcggagcaacgtgggcctcccctatgagtcaccgagcattatgtgtaccgtgacccaatgagagcggctgggtagacgcttcgaccagctgcatcacggtcatgatggcatcgtttctcaagctatacagaaatatgacgattacatctgttagaggagactagcatagctgaaccgcctggaggtagatgcccacttgggattcctttggcaactcatggacattgtattcagcggaggcttgagccaatcgtcgcagctcattgttctgcatcccggtaccagcgccctggagcacattcaaagccgcctgtcccgcctcgtctaaaccagtttcttcttcatatcggagttgaccccaccgtttagcgaggttggaggccagttccttatctctattctcttgtttaacacgaagaacgtttacggcggttctgatagcttccgtctgtggttttgaacatttaacaaacatcctcgaataacccaatactttttgggtatcctctaggttatggtccgcttcgacagccacgcccttgtcgttggggcgagtgtcaacagtgctacatggctggtcagatggctcgtcatccggacccaaaggctgtaccgtgatcgtgacttttccatcatcagtcgacgtgacactgtactcgtatttcagtcacttcgcgacggttgcgtctgtgaagaccgaggttcaagagcaatcgaatgttgacgtgtcgaatggcatatttattcccgttttttggtgctcgtgctacaaaggcgttatatcttggtgagcggctggttcgtgggtttggatcattggctagcacggactgacaagaccctcatatacacatatatatactcaactttagcggagaggggggatcgcgcgttctcgaaaattggcgactcatcacgtcacggaaggagccggcgacaaaggaacgatctcacgcagcaggcggtcggcaactcgtcatctgctgtgcatgacacaccataccatttacctatccggatgaacttgtgtcaaaggaggagatatcgttgatcatgtgcgcaggcgcagtgtcaggcctcgacacagccaccgcctcgagcggcatgcaaaggcaaggtaggcgccgtttggccgaccgtttcaaagggaaattacggcttccgcgcgtttcaactcgtccacaccggtagcggtgattcgtcatgaataatggtgagatacaaacgattcccattcccgcaagttttgcagcaggaagcttgcctacaatctcatgactcaggttccctcggcgatggttttgcaaattaggcgatcgtgaatagtcctctcggtccattctggcaaatcatggaccttgaactgaaccaccgcccgtgctaaacgattcatcttgttcatcggcaagtcaagacggattatgttgagcttggccaggacgctcctttcgttctcgtctagctccgcctcgtctttcactttcagttcctgataacgtgcaaagacatcggagaccatttgattgtccctgcctctctgtcgaaccttgagatgattctgcgcggtaagaattagtactctctgctgctgtaaatatttcacaaatcctcggggtaacagggctttcgccatgatcgtttgtgtatcctctagtccataatccgagtccacgccaccttcgggttcgtacactcctcgagtcatcagattcttgttccgagcccagctttgaaccaaccggttttggtcctctgtggaaaccttgccctcatgtccgaacatctggtaataggattgttcttgttccgtcaactccgtttccggtttgactttcatctctttgtaggtttcaaaccccctttccgccgcctgattgtcgtctagtctatgaactcggtctttcttcaactcccgcttttcggcttttcttttcttcatgcataccctatgggcgttttagatcgtgtcccacattgaatcatccgttagttcgtcgtgcaccccgatgagcaccttttgggtctcttcagggtagaagtctgatgtgacggaggtgcctttatcgtagagtgtgactctgagcgttccccctcctggtcccttggaggtcagcttcagcgagacctcaccctcggtgaaagactcgatagtggggccccagacatcttctgatcacgcctgtccaaatgttgatggagcgaggcttgctgtgggtgacattttttgttggtttgctgaaggtcaactgattgagattggatttgtacgttagaggagttgtggcggtaggatatggctggatctcgcaacgatcttccgttggaggacttttaatctatccctatatatacatcgagagcattaggaaagccccagttcttgtcgccccgagagaccgttgaaacgtttcgttgggaatgaaaggaacgacagcaaggaagtcatgcgatctgtccaggtagagtcgaatgtgtgtgggtgtcacaccacgtcatcacgccacaacgccttcgtcactatgcctttgagctgttaacggccccatggcgtgctggattacctcgacaatcacctgacatatcaccaagtataccgtcaggcggtgccgtcacaatgccatgtagcgcaaattacagggtactttcagagcttcagaaggatattacgcccgatatgtacaccgcttacgcttctcgcacgtcatgtgacgagaatacttgacgccatctcatcaaacaccacagatgtgcggacgatgacgctgcttcatctagcttcgcgtcagtatcaatttatcatttgacaccgatctatcacatgcgttaaaactacctcgagactgatggagctatctacacggagctttgtgtctgtagctcctaatgtacactgcttgtccaagcggagcaaacacctgagcttgctccgatgtactggctttttcttgagcccgttagggcaagattgcacaacgagatcagtaacaatctatttctgcgaatggttcagtagctacacaggacgctcggtacggcggttacaagtcactgaggccaggtctacttagattgattgactagcttctccagacaacttatcgaccgggggtctgctcaatgttcctctcaatcatgacctgagagaatcggttcatctcgttcgtaagaatcccgacaccagactgattgaactggcgccaaacttcgaattcctcgttcgaaaggtactccttgaccactttcgctccagaggcagaaaagatcgccttcgcctcgttctgcactggctcggttccgggcaaggcctctgtctgccttatcgtctgtccaaacttcttgtccagttggccttgaacaagtccaagtgacccgatggtgccgaacatatcgcagctcgagcggaccgatccatcggcttccagcgagacagacgatgggggggggcaccaggttccttggaggcaactgagggctccactgttcctttcacactgctgttgacattaagttcatggcagtcctgccttgcaacagagccagacgggaattgcatgctatcgattgataaaggcattagaaatgctgtcaaagtaggtagatcaagagagatgtgtgtatcgcaccggtaaacaggcgggtcgagggggagctgtctggtcttggtcgtctagagtacatcatgcggcacgttaccaatctccattttctcgccccccgccttatatgtgtgtgcttatggcccacacagccgaatgtggcgacgtatgacaccattcgaggggctgccaactaaggaaccgttttacgagatcgcctgatctgaatgacgtgagcaggagcgccgacaggcagctggtcaccaagcacggcactcagcaggtgacgacgctgtcgagaacctctggcccctgagtgctataacactttatcttaagcgctcagatcaaaggttgaccatatggcgttaaaggcgatacgattcggggaataaaaaaatcatcgaggctgcagatacaaatttctccgttaagcgccgtcgacaaaggggaaccgaggcgccaatgaacagccacaccaattggtattcagacactcgactgagcggcctgagatgcagtctcggtgcttctcccaaaatggccgccattatcatctgatccagaaacaactcgcagtgatgtctttttggagcggtagaacggcaatcgtccgagcctctagtcaattcggcttcgtcgcgcacgattctggtgtcagttttgcggagacgtactcgaacaaccggccgacgtgagagaagagagagaccaacagacaaggaccatgagtgtctagcatggatctatatcgcgctacaacggctcgcctcaacagaccctaaacacgtcgtaccgcggctgcacctgctcttccctgtcgttcggccccaacaccttccaatgaatctcgacgtcgagttcccgggtgttcccgctccgactcttgcgacaccggaaagtaccctcgatccgatgacctgttgattgtcgtgtcgacacgcgaaagcagaaacgcccagtcaataaacttctcttgtcgcgcgcgcgagcgcagcaacgcccagcctcgctcgacgacctctaaacgagcgaccaggcgagccaagcgactcgagcacgtcgtgactcaccggcaggaatttcgacgggctccttcaacatgaacgccacttgcttccaatgcgtagccttgcctctcggtccggtggtgaaactgacttcgcgcttgccttccttttcgacgggaacgtcgctcttgtacgcgtcgtcgtcgtatttgacgtactgggtatcacgatcgatcgccgcttgaccgctcgacgaggcgtcgggggaaaagaacgtgtcgaaccaggtcaggaaggccctcatctgggttgacgactcggacgaaacgctctgtaagacgaatgggctgttgaaatcgagttcggggacggtcacccggttggtatcaatgtcctgagtggcaccataggcctgaggtcagcccggctcggttcggtggacagatgaacgatctaagcgcttactttgaggggacactcggtcgtcatcaattccttggcgtcgacgacctcgatgatcccgtcctcgaactttgtaggtttcatggccgacaagtcgaagcctagtgaggtgtcaatcgatcggccggggatggtcaattcgagtcgcctttttcacaaactaatgaccggggcgactcaccgtacaccttgtcccagaacccaaacgcctcgttatacatcctctctccggtcatacccgccagcataatcctggtttgactgggtaccatcaatccaccgggtcgcatgaatcgatcccgagcgctgtaagggcaggccaccgcgattcagcctggattgcaaggcgctatgttcggccgtctcactactcactggagcactgaatccagcatcgactcgtaaagcagcatgtacccctgtaacgatcccagcacattcggacgtcccatcaggtctcgctcgtcccctcgaccgaccccgaaactctcttcgtagactgaccatccactcgctgacgatgacgtcgacctctttgcctatgggcaactcgatctcttcgaccttaccctggacgacggtgatgacgtcctgcaacccgttgttggcgatattcttcctggccttgtgtgccaacccggaggcctcgatggcgtagacgtgtttcgccccggccctcgccgcgaacactgcgtccccgacgatcggaatgggtgagcaaagctgccccaaagaatgctagcggatggctacccggtcggactgcggactgactgctcaagattcctgatccacaaccgacgtccatgacgatagcgtccttgaagatggtcggattgttgaggatgaattcaccgtacgacatggtcctcaccgtgtccttcaacatggtctcgtgaatgtctttggggcgagattcgtgtgcgtatcggcatggatatcgagagaagagcagcattctttcagctgcactcgaggagcgcgatcgagctgccctggtactgaccgttcgaagcgtatgaatcgaaataatgggtatcgatatccatcttgccctttcccttcttctcctgtttaccatccccggctttccctttgccctttccctcgacttcgctttcgctctcactggagccgtcctgttcgtctttgccacccgctacgatcaaccggtccaagatggcctgtaacgacttgttcttcttctccgcttgtgccagttggttctggagggtcgacaacgaggcttgagagaggtcccccgcgttcgaggtcgaggtggtggtagtctttgcaggacccgaagtcgaggttttgggcgggctgggttcgtcgtctgaccacgagtcgtcgaagcagatctctgtggtacagagtggatgagcttggggtatgggtgtgtcgctcgcaggggccgagcgggtgaacgcacttacggaggagaggatcgttctcgatgacgggtttcaagttggtctcgtcctggaagatctcgtcgtccggtttgagactcttcagcttgtccactcccggtgtctacccgccagtcgcccgtcagtctcgtcctctgctgtttccgacgacccgcctacgtcaggacccacctctcgcctgatatagttgatcaacctgatcctggcataatcgtccagccctaatcgatccccctccttctgaacattgtacccgtgcaccctctcatcacgttccaagcattcctctggggtatccagcacgtcatcgtcgaacagtgactttgtcctgcgagctccgtgcaacgaggacgcccagtctgaaaagtcttccgggtcgctccccgtctcggaggaagcggtcgatcgcgaatcgttggatgcggctggcatcgtaggtgcagggatgtacagtatatatgctatggcgagatctatcagggtctctcgaggtacagtagcttgctctacagatacacttgaatcaccaacctacttttgactgttcatcgacttttttccctgaaatttcgtccaactctcggcgcggagaaatccgaaaaagcgaaatcaaggagatccggagacgggaattcgacagaaaacacggaaatcgaaacagatatatgcgaatgttcatattcgatgacgacgatactctgggcagaccacgcagtctacaccgctgctactactattactactaatctgatggtacgcggctactcgctacgatccatgtcgaccgtatcatcgggctgctggaactggatgaaatcttgttgaccggcgatcacgtccacgtcgtcctcttcgtcttccgtatcgaccacctcgtcatccccagcctcgtcttcgtcgtcgtcgtcgtcgtcactgtcgccctgactgctactctcggacggcctgacgcccgactgtcgttgcgctctcaaaacctcgacgagatcttccggcaaggcggtcccatcgacattaccctctacatcgccggcctgctcgcctgtcacaccggtctgtcccgcacctccgccgccgccgccgccgccgacgttcttggcccgtaagatatgcatcaactcacacttcttgcccctcttgcacgtcccgctctcgctatactcgcgacactcccaagcgtgtcgttccccacacgtcgctcccctctcacaccacccgatcgtcgagaaatccagacagacgggagcgtcatccttgaccttgacgtgtgggtacctgcagtccttgccgttcctgcattgtccggtccgttgaaaatggacgcacgagggcgcgttgtgcgggttcgggtggtgggagacgggacaggcgtcgtcagagtggggacagttgccacggaggtacttgctgcagacagagatcttgtccgggtcatgcacgtagggacaggtcgaggcgcgttggcaggctcctgtaagtcggtcgtcgcgagaacagggcgagacgcagagcaccaaagaaaagagggggaaaaaagagccgcctttgagcagctgaaacatcgtctcgtctcgattccgaccgcccgacaagagcaggccagagacaccgccgcaagcggatgtccagagtgtcgggcggcccagaccttgggcctagatccgacgccccatcctcgcccattcgcatcgtgtcactcacccgtctttgtgaaataccgacaaggctgggatctcttcttaacgtccagcctgtccgacgaatctagtgtataagcccttggcttgggacctggtgaaaacctctcgctcacgactgactttttgttcaacccctgtgcactcgatttcctcctgacgaggttacccgcccgggtcctcacgtattgttgccccgagatggaaaaggacgatcgggtcgggatgttgatatcgggttccgtcgtcgtcgtcgtcgaggcggatccttctatttgcacgccccgacgtagtccccggacgagcggcatgtcagaaccgagtggccgacgacgacacctccattctcatctagtgcattgagtgctcaccttcggtcctcttcaactttttcccgtccccttcgaattcgtagaccacaccatcgatgacgacgaccctcttgcccctggtatccaactgagtatcgtatttcctcctcgtcgatcgtctcgacgccggattagaggaggacgatgacgaggggatggtgctagtcgactgaggttttgccgaatgcgccagccgggctttttgcctgagtgagttgtttcccgagggtggatcggtcatcaagtaccaagtaaaggacaggtggcgcatcaacggtctcgctctcgtgccgtcggactacgacggcgggggcaaggactaactgttgcaagtagatttccgggttgatcaagctcttgttcccatgcctgctcgtgttattgacccaacgaccttcttcttcctctttcgaggttcgcgtgggtatgccgatgggtgggttagctacggcgttgatgctggtatcgaggttgttgtttgcggtagaggaagacccgctggggacattcaaagaggaggacccagccgaagatgaaggtaccgacgcctggttgttatggttgtggttgtggttcaggatcaacgactgattctggcctggtctgaacgtcttgttccctgtgacccgcccgccccggggcttgctatacggatgtcctgccgccctggcatcgattgtcgctttaggatgtccatgagtgaggttcttgttctttcctgcgatgacacctgcagagggtcggacgacggggatatacgagaaggggtcagtcgagatgatgtggcgaagacgtctccgggggtgctcacctgtgagtttcgcaatctcgcgttcgagcagttctttctcggttggcatggcgcagtggcgagagtttttcagaggttggtatttcgagtacgatcttgcttatttgcaagtgtaagacgattgtggtcaggtcgcttgtgtgtctgatcaaaagggtcgacgagttgtacaagttgatgatgatcaagggccttgaggttgatttgaactttgagccgagactcttcgttgacctcgaacatcattactcgtcatcagaagaggcaaggtagactcggccacatgggccatacatatatatatatatatatgcacctcaccacactctggtacattgacaagacaccatgctcacacgacagaacctcatcccagccctgtcctcgcccccgaacgtcgaatcttgaccaggttccaacgtcttttacccctcggactccctctcggcgcgttctacctcgtcacgctgctcttcctcccgaccgtgcctcgtccgaccagacgtaaattcctcgaagacttcagtttggccgcagccggtacgggcatcggagcgggtagtagcgtagggttgtactacatgagctggagtcttcctgacctcttgccctttaatgtgagaaagcccgagcatcgctaatcatcgtgccgcctcactggatgcgcacgcgtcctttcgtgctttcggcagcctcgaagatgagctacgatctgatcctcatgccgttccgatcaaccgcatacccttttgcgaactcctgagtctcatatttgtacatccgtcatagtcaaacgactgatccgttgtaaattcactcaactcaaatcaagttaaatctaatcggaacccgaacttgacggctcacggctgcataaagtctagctcgactacgtttcggacccgcgttccatcttcgaaatcatttctaccgaagcgcgatcgacgccagtacagtatccatcatcatatctcgcggtaggggcaggagtagacgaccgtcggtgtgtcaagtatctacctagctatctgttacgggcgagtcttgtcgatccagtgtttgggcggcactcgattaccgttgtttggggagagagcttggggacctggtcaatagcttgcacgagcggattgacaacgttgaagagcgaatcgacggccacgaagaccgaattgacgggaactctgagcgaattgatcagaacaccgtcgcaatcgagcgactccgagtacagcgagtcaacggcaactcggaacgacaacaaaggcacgctcttgctctggtggcttttcagcagaggcaccaacaaagcctgatattgacgctgcaagatcttgcgaggccaggtctggatccggcctctcatgtgcttgctatcgacaacatcgatccggcactcgagtcgttcttgccatgctcccccggctttgctcctcgagataaccactcggctgtggttcccgaatcgaccactttgtatgtcaatgtacggtcctggaatccgctgtcaccgtttcccatactatccccgagaaaaccttcctgtgccgaacctacatacaccagaggtagtgccatgacctatgttacggcggtgatgtgtaggtagatccctgacccagaagctgaaaagggatgtgttccgccggcgtctcgtacgtctcgttgcgtaaggggtgtatcagacaacctaacctttgcgagcagcctcgaaccgacctcccatccatccaaatattgagtcaagggtagcacatttgctggccccggactccaataatatctccatggagaggttctcgcactggtcaatcccaccgctcgatatgggcggccgccgccggcacatttgattagaaagaaggatccccgccctgctatgccagcctaatctgtaaggacgagctggacaatgcttcgatgctagaaaatcagcttcgcacgaggacgagcttgaagctagcacacgggccgctagtctcaggcatctccatgcaatcagggtgtatacgtatgctcgcgctccgggttcaatgtctatgatacaagaaggaaagtttgtcactgacgacaacgagtcacgctgtccggcgtgagtagagttcagggatgggagcccaatgagctgggccgtcgaaccagtgctggcgaacgggtccgctctgtatcccaccaacgatcagtctcgttgacctcgcgatgagaatctagagtgctgacgcaaactcaccatctcttgcttgccctgtcagactggccgatcaccttgtgtcccgacggccgctgtcctgcccatctcacccccagcctgcagcccagcttccgcgtcatcctcgtccccatcggctgcctcggcgatactcttcatatcctctgggtccatccatgattcttcgaccgtggcctatcgacgtcgtggatcgcatagggaacgatgacgtccgtgattccgcgcagtgtcgagggtatgtcgatccaagggaagaggagattcacgatgagacaggaggcatccaatagacagacatttgtgtcagcccttcttttcctacttcgggcagcaggtatcccggcctcgagacgactgctcaccttgacccgtctcacatactccttcatgttctccctatacaactgcgccgcttctgcgtttgccggactagcagcccgccgcgatccgcacccgtatcagctcgtactccccgcgttggcagcaaggcgcctctctgacctgcactcacctgttcggattcggatcgttcaacaaactctgtacgctcgtcaagatcgctacgacgtcataagtcgggctccatctgttctgtaggatatccaagcacaactctccgttggcatagacgttgggatggaagatcttgctgatgaatttgacggtcgggggagagtttgggtagttttcgttgaacgtcatcaggagcctgaacgtcccgtcctcgaagggcgtgtccgctgatcatagggtcgtcgacgcagatgcagatgcgcacggacgggtcagtccttgattttctgcacacgctggtggtgtgggacgagacgagacacgacccacctggtccaaagatgacggcgttccagatcatgatgttgtccgccttgggagctcccgagatgcctgcgggcgggtcggcctggagccttcggaaatccctcaccagacgtcttcgtgcggccgtcgactacgccggggggacccgatcacagggcaggttaggcatatggttttcagtgtggtttgacgacaatcgaggttggtcgacgaggattcggggcttaccatgatgagatgggggcgtgggggcggattgacaagcttgcgaggcgggtactagagcttcgagttccgtgatgctggtcgtccgatgtcgacctgtcactttgcgttcagatccttgtacggatagatgacacacgaatcctgaggatcctctcgagacgattccgaggtgatgtggtggatgtttcgaccacccctttatgcgatgcgggtctggacacacttgatgagaactctccgaccggcgtttggcgagagatgatggctcgtttgtaccgtagtcgtcccgtttcgaccggcgataacgacgattaacgaaagtcaagctgaatgaattgctgatggatagatggctgtagtgttatctgatctaagagtagtatcgatgtgtatgcatatatgtgtgttgtcattatgaatcacaagtggttcgcatgtgatcgacgtcgagcgagcgagtttcttggcgcgggaatgacgagatttaggtcgcaaccaggtagagatatgccgatgtagtctactgatttatacatcgcaacaaccgcacaaacacaatgtggaccccggaaagtatactcgtacagtcatccaatcgattattaccaccttcccggtccaccggcgaaaatctgcctctccaactcgctcaccctcgtcccaaacacgtcgatcgccggttcctcctcctccccctgcgcgacgtcttcgttcattcgagcgtggtctccggcgtccattccatccatgtcaatctccatcaaatgatcccacggttcaacttggtgcgggtgagagtaccatcgatcttgccctcgtagctcgtcgtgctcatcacggtcgtcctcggcttcgtaccgatcgaccgtcgtcccatgcacctccgtcacttgacgttcatggtacaggtcgagatcacctagtcggtggtccatgtgacccagagatcgctcttcgatatccatgcccatgagtgcttcttgatgatatgccgcgccgcactcttcccaattctccttgtcttcttcatgaagcagaacctcctccatcgactcgtgccgacctcccttctcggcctcacgcaccccgtaccctacactcagacttccccactccgctttctcgaatcccacctcacacctctttcttctcgccttgggcggcctgaaccaatttttctcctttcctccagctccgacctgccacccgaccggtatacacctcaacgccgttcccccctgtacctcggcatgcggtacctcacgtcccggtcgcgtctcctgccgagatctcgaagctggggtatccgtccggatgtggaagctcgagccttcggtctctccctgtcttcgacccaagatcgagctcgtcgtctcccgcattcgaacccggctgggaacgctgtcggtctggtgacgcagggcaggtccagctcgagctcgaccgggagacgagatggaccatgtgggttcgagctcgtctaccagtttctcctgatctcgatccaggtcgaccgctgctgcgtgtagttttttcgaaacggacgaccgagatcgggagcgtgatcgtgatcgtgaacgcgatccagaattctcctccttctccgtaaactgcgggtctttctcctgcttctcatggatcctcgtcgacctgcgtacttgcgaaccggcacttgggggaggaggagacttgtcgaccgatggagcacgaggttcgaaccgtctcaatttgctgggtggggaggacgacggcgcacgtccctccaaacctgtcgcttcgattcggttcacgctgagtcgatcatcgacccatcatgtagatctgaccgacctacctttggcccccgtcccgttcttcccggacgacaccttgagtccacccaagaacctcgtcgacttgtcacgctggaccaaagtcatcctcctgcctttggccaacgaatccgacttgaaattggccatcaagctgagcccgacgttccctttcctcttgcgtaccgttgtcttcgacggcctcggatcgacggcatctaatacgggtctcgtagtaggtcgattgatgacctggatcgtatccctctcgtcgtcctcgtcgtcgttgttttcgtcttcctggtgatcatgcatgaataggggtttggagggggtatgtcgaatagcagccttgatccgccgtctgatcttgcgatcgtgaaggcctgtcatccgtcctcgttcacccattagccatgtaatttctcgttgagtggcgaccgttgcccatcggggactcacgtctggcactcgaggtcatgctcgtcatgtcgacctcgtcgagcccggtctggatgatggcagcctcgagttcgttctttgcatgaccagctagtacccgcttaggtctcgagcctgcaattgtgggtaggtcggtcttggtcttgctcggcttgctcttttcggtgtgggtaggtcgatctcctggatcaagtcgtatgttctccttgtcctcgtgtttgtgtgtgctctcgagcggggtacgccggctggacgactgaccctgtttgacaatctcgctacgtttgaggacgacgaccgtatcctggtcgactttgaacctcgcctctttctcccccgatcgatccgtttccccaggtagactcccatccttgcgtctcatccgcctgacgatcccgctcgacctcgcactcgtcctccccgtcacggtgctcccatcccaactagtcgacctgctcgcctcggcatccttatcccgtgcctccctatccttgttggcctgctcccgcttttcatccctcttcagggccctatcgatgtgttcccttccacggatgacgaattcgtacaagaacggccgtgaaccggcgaggtatcgctggatatgatcagccgggttcgatgacgttcggaggtgatccggtacggcatcgatcggggggtttgatgccatggtaggccaaagtcggcaagatacaagatgttgattccggggtgtatctgaagtctctgctgctcactgggtgatgtgctcgagagtcaggtaacatcgtcaaggcatggaggtcgattcatcgtgttgatctaccttgaatcttggaggaatcgactttgtcaacatctcggctcgaaaaggaaaaaatgacgtaatcgcaaagacaaccgttgcatgacactacgtcgtcgttgtgaacgtcgtcatcgtcgtgatgatgttgatgatgattataactaatggatacagcaagggagggaccagttcccatctaataaaaggtcgcagagtcaaaaagtaacgtgtcgagaacaaggggtcatgcgggagtcgatagacgatcgtcacaagtacgtagatgaggaaaggtgtaaaaggtcgacgttgtccgatcatggatcaagtcgcaagtcggtcgtgatgtgccagatagatgctaggtcgtaggtagcgaggtaatgtttgtcaaggggaaatggtgggtgggcctgttgatcgtgtcggaccttcgggccgtcatagcgagtcccccaatcgaacctaatcacgaacaacacccatcagcctccatactacttggctctgtcgctcgtttcgtctcgaaaactcacctcgcttcggaccagcatctctcaagctctttactttttctgctcggccgccttgaccaactgactcggtctcaacgtcggcccgccaccacgacccttgtccgcgagtttatcctgatgataatcgtacccctccatccccggcttcttcctgcctgcgacgccattcttctcgttcagtccgggttcgagatcgacgggtgcgtcgtgtacgacagggttcaatgtcgtctggctggaggtctcggggatggtgttcccgttcgtcgtcatcgacgtgacgctggtagggggcacgaggccaggtcggtcgaaacaaccttcttcatccctcttgacccgctcggacgacgtccacggtccgttcctcacgatccacttgtcggatttccacaatacccaggtggcccagagacatgccaaccaaccgggccagaggaacgccaagctcgcctttgccaacgcattgtccctgtaattcagggggtcggacccgttctccctcaacctctgggtgatcgtcgcgatctgttcgggagtcccgctgatcctggacgaccgggtggcgaagatgacggtcatggcgatcgcactggcgagggtggtgaaacacgtcgctacggcacaccatttccaagcccttcggatccccttgtcttccctcctctcggggaagatcaggtcaaagaaaaaggccgcgccaaagacgaacgcgacaaagatgccgttgaagatgttgtaactggcgaccccgatataatctccactccactcggccactccgtcttgattgagcctggcgatatctttggcctgatcaaggtaatcgctcagggcggccgtgcccaacgattcgctgatgacgcaaaagatcatggcgagttggtagacgatgaacttggttcgtcggaggtggtacgtcttgttccacatgtacgaggatttgaatttggcaggatggacctgacggaggtcgagaccccagagcgtgggtgacatggttggcgacgtcgagaaaggtggtggtgtgctgtgtagcttcgaaagatgtcgtgaggtgtaggtggtcagtcgagtgttcgtctgaagtcgttcgtggcacaagctggagagtgcaagagtttttctgtgtgttgggtggtgtttcgaaagtcgagttgcgagttggatgtcttcgagtctgataagataaatcctttgacgagttcacggtcgacgtcgtccgttgttcatcttgggcatgggggcgggttgtttgatgatgattttgtttgatccgttcgctcgcttaaaaatagaaaaccgaaaggatggatgacccaccgcccgcgtcatttttctagaagccgcaagcgcagacaccgaggcaaggcgtgcgggcgaggccagagctggcagggggggcgtgctcggctgcgcgctactgagtacggcgattacatcatcggtgacctggtctcattaacgcaccgccggctgccgatgtcaaaggacctgcgtcatggaagagaaaccgaccgacggggattcgggtccaccgaaccacaacatgcaaaacatggggaagggggaagaggggggggtttcactcggtcgccgtcggtctgcggcaacgccgttgaaacagctccctgcccaacgcggtctcggcgaccgtgtcttcatcctttgacgctcttgttccccgatggtgatgcgatccgaaacgacatggctcatggcttcacagagcccaatcacaaggaaactcatcaccacagacttcgtcattctcgtgatcagtcagtaggatcgttagtagtgagtatgggagcttcgacctgcttttcctcgcatcctcgaccggccgatatgcatgtgcacaaagtgaagagacgaggtgacaaaccgcggccaggtgatgaggaggcaacgccaagtcaaaccgacacggtcatgacagaccggattcctcgtggtgtacaaagcagacctacagcggcttgaacgcactaacgaagtcgagatgctgaacacgatgataaacaatggttagtaaacgcgcggtgcgaatcggtcaaccggtaaagaaacgggcaaaaagtcaaaaagttatgacgtaacggtgaatcgaacaccgatcggctgctaatatcccatgtttagtggaaggcagtcattctaccattgaaccattacgtcctacatgttctaggtgcattttataatgttatacacacgaccgagctgtatggcacgaacacagcttctccttttcgcatttcaggtcactttcgcatacccttgccaccgcttttacccttgccttgctcgaacgctcgtcttccttccgtccacctctgtctggcttatatcgtgggacttcgaatgacgttgtcaggtgtgaattggtcaaagaggtcaatcttgcaactgatgctgggtattcatggggatagtttcaaggaaaccgcacaagccttgcactgcttcctttactaaaggtgctatatgattgaacttggaccagattccataccgttgccagtgtgaaatatggccatggcgtcactcgtttcgtatttttgtcctggcaaactacgagctagcgcaatggaggaagttgttgtaaatgaagcggtcttttcgagaagatcaagcagagcgcccgatggagcatgaagcattgctgcataaatattatttgatatcgaatctcaatcatatcggtcaatcctataatgacctgattagcaggtctagatcgcgatggtggaaagggcaatcataaagatgtcgccagaaggaaccaaactgcagatgacacgtaaacctcctattcgtggcggtgtcgttagaaacaggaccaataacgtgcaactgagaagcgaggtagtgggaatgcctacctaccaccactcagaaggtacgtcgcagggacaatgaacttctttagttggcatctccgactgtcacggaaaccttccgccagtgcatgcgttgggcagaaacttgacgtggatcatacgattgcggccgtcgatcgaggatatactgtcccagcgacatcaggctggtcctcgagtgactctacatgatcgtgagcccaaggcagccaaccacgacccagacgcactccgtgacggacgtgcccgtgatacctcacatcgactttaaacgcctcttgacatgcgcatgttgccttgatgcgaatcttttctgtcgcaaaccgtctggtcacatctcgcttccagaggtggtttcatcgctgctcatcggtggcttatggccgatttatgtactcgttacaaacatataaaggcatctctatcgcctcttgttccgtgatcgctcggcgtcatcctccgcagtaacgctgcgagaacgcttccgactgagtacacagtgcttcagttcaacaatcggctcttgcgcacacgaaccatgaccactgaaatacacactcacgatcgttcaccctctgaccgagtcgtcgtccgcctcgtctctcgcttgccatcatcatccctcacactgtcgtcgtcaccagcattggatccaccgtccttgtcgtctttgcgactcgttctcgaccggtgtccgtccgtccggctgcttcgggtgtgtcgtcgagtcccgctgctcttgccgtcttcacctcgttcactgtcgcggtcccgcgttctctctcgatctcgatcccgttcgcgatgtcgatccgacctgtccttgtcccgcgtaggtgaacgcgaccgagaccgtctcgacgtggacgacttgttgggatcatcccggctgcttcgatgacgatctcggtctcgtcgatcgccatcacgctccttgtctttgtccttgtccttgtccgtccgggacctcgacgtccgactgccttcgtcccggtccttgtccttgtccgacctcgagcgcgtccgactcgcgccatcatcatcgtcgccgaccacgtccgacgccttggcctcggaaacgaccgagtttcgtcggcttggcgatcctcgacgtgaacctgctcgactgtctgtcttttccgcctctcgctcgcgttcgctctctttgcgctcggtacgtggccgatcccgatcacgagggtcgtctcgatccagatctcgccccgcccgcctatctcgcctgtccccatcttctccggtacggtcaccccggcgagatgtctcggcggcgggtgcatcggtaccaccgccaaattcggcgccatagtcgagctcgactttgctgctatccaccatcctgtcgcgatcacgctgaggtcgactcgctttgggtccagtcgggacgttggccggtggaccggcgttacgagggccggttggagctgtcagcaattgcgtaagatcgtcagtcatgcggctgtgtaaagctaaaaacatgaacacaagggtccaactcacgagctccaccacgacccctgaaagcgcccatcccacgcacggcaccacctcgccctctgatggaacctcggaacccggcagccggacctgtaggagctccaggtacgacgggtgcgactcttggcattgcttgttgttgctgtacgccagcattgggcatctgtcctccttgaggcatggtcatacccataggcgacatgccgaaatctcccgcgccaggcataaccatcccgttggcttgcataccgggcatcatgttcatacccgcgaaattggcgaatccaccgtccgcgccagtaaagccagccatgttgggcatcagccccgtcatggccataggattaggcttgatttcctgtgacgtggcgacattgatcaacacgagtagacgtcgatcgtgccgatgcgatcggacacttacgttaccatcagcctgaccctgagccgttccttcgggtttggtctcgccctcctcctgcttgacggcgtctcctgtctgccccggagtcgcctgtccaccctgcggttgctgttgcggctgctgcagctgtccaccttgcatttgcatttgatgttgctgctgttgcatctgctgctgaggctgctgttgctgaggcccgcccgcgccaaacatgttcatcatgcccgccatctgtgcaaagtccatcccttgcattccctgcattcccggcatgccctgcatcccttgcatcatcggcatgcccatcatcgccgccgggtccatgcccatttggttcatctggttgaacatgtcgggcatattcatttgcattccctctggcattcccatgcccatggccatgttcatcatgcccatgttattcccctggttgtcggcgttgttgccgggattgttgctgttgttgttgccgccatcgttcccgccgtcctgtcgagctggctctggccctggtacctgcctaggtagatgcatcagatccgctacatcgtccggcaacccatcaccgggcttcatccccttgatcccctcgaccccggtcgtcatcccgcgtctccaaccgagatatttcgtccacgaatcctcgtcgaatccgtaattgaaccacttgctcaggtcgcttcctgctcgtctccaaggttgacccgtcgatttcatgacggcgaggtcgtattcgtaaatgttcctcccgttaggaagagtgggcgggtcgagcgcgaatgattccggatctggtacggccggatgggtggaaggtgcgtgggggatcgggaggtcggattcaggcatggtctgtgtaggccgggttgggtccaggggcgcgacaggaggacccgtagggtcgatctcggccgtatgttctcccaaaaccggctgagcttgatcctgaggttgcgtagccaaagtcgatttctggacgggcagagtcctcgtcggaaccggtgctcccctttcaagcggggtgtaatccgtcatcgatcccgtcggggcggctaccgcaggcgtggcagtccccactagttgatccgggacgatctttctcatcagcgcatactcagcagtacattgcatcccttccgaagccaactcaccaggtccactcggcggggctaaaacaggcgggaccgccaaggttgccgcgttcattcccatcccgctgaccgcgatattcatcgccgggccttgactccgaatgacctgctgattcctgttcgtccgcaaagtcgaccaagcgcacggttcgaggtcgaattcgaggtcgaggtcagggggagatgagatacgatgtcacgagcatacggggagatgttatatgattgtccagagtgaatgaggaaagtcgtcgatgccaatcagcgaatgttcttccaagtcacacgctccagcgaccccggatcgaaaggctgtcaaatcaaggggggaggggtgggggaacttgcctgaaatccatactcctctgaggagcgttcatcaagatttccaacccatcatcctcgtcctcttcctcttcctcgtcgtcctcactctcttcgtcctgttccatatcctgctcatcctcttgttcttgccctgcttgttgaccggtccctggttgcgcggtcgagccgtgcaaggcgttgtccacgctgtacccgggagctacgccatgagcctcgccggatgattcttgcctgagactctcggcttgaggggctgatgtcgggccagggagatcagtgtgatcgtccccataaatatcgtccagttcgtctctcgtgctgtaaacgggtggtcaggtcgggtttcaaaggagtatagcgtgtcgtacgggtcagttggcggtaagcatcgggtagtacgctggacgtgatcgcgagcttactcttcgggttgttcggacgatacgtctttcccggctgggccacacgacgagcggcaagacagacatcaggagatgatatgatgagcaacaattcccttatgatacaccacaatgacatgtctggcacagaacggtccgatgctcaccttgatacggagccccagcgagctgctcctgcttgacctgtccttccccgcccgctgactcttcatcgccgtacaagaacgcgtcgtcgtcgtccgattccatgatcgagtcgagctgcttgactgctagtacactggggggtaagtaataccagtggacctgcactacgactgatacatgtcataggttgttcactactattccaacttgcaacttgtctaccaacttgtctcaacttcggttcgcgcgcgcttcaaagtcggacaaactcgcgcttttaccagagacagaggtgaaagtgacagcaagggattgggggggaggatatgttcaaccccagatgtgatgctgacatgataggtagaggacataggacacatctattcgaaaacaagttcgacctccatgctctcgtcgtatacgaaatccatgctcgatcgaacgggtgctaccaaacgcgcccattcgaggtagacgcgaccactgcaagggtaaaatcgagcagacgtgccatccgatcagcaaaaggtcctccgtagtcgacatcgtcctttttcgaggttcgcacgacgacactcacatgtaggccgccatgtcgacttttctccaatgcgtcatcgtccactcggcgcccgcgttggcgatctgtcgagcgagctcgtcctccccgccctttccatcgaccccacctcggaactgtgcatgaacccgtcgaatgagcaggcgttcttggccctagcactacaatcccctggaggacatcgctagaaaggctactcacgaatactagcgcatctacgagatccccgtaattcaacccgacgggtacataatgcacccaaggttgagccctctgattccaccattccggcatgatggtcgatttgaagaccacgctgccgccgagtaacaacctctggaaacggctgctccacgtattcccatcgctgcgaaccgttcgaccggtggtgagtacgctgcgaatacgagcgggagcgacgatccctagagcgggatgaaggaggacaccgcgcgggactcacacgtcgacgacgtatttgtactcgagggcttcctcgtgcgtcatcttttgttgggcccagatgtactcttccgacaactgctcgcacgtcccgtcctccatttcacattctgtcgattcaccacaacgacaccgtgtgagcacgtaagaacgcccgctcgcgacggcgacgatgacggcgactcacggataggttcaccggcaaaggcaatgtccagcatcttcctctcgatggcatccttggtcaagacacgcatggcctgcttgatcgttttcctcctcttatgtgccatcaaatcgtcatcatcatcctcgtcgtcctccctctcctgatcatcatccgccttgccccatcggggcggtgggatgacgtccaccatttcgtcgccaccccgtgcgagctcgaccaacctgaccctatgcgtccgcctccaatcgatctcttctgaatagaacgcccccgtgttcgaccctctccagagcaacttgtccttggtccttctctcccattcgatcgtcggtagatcctctgtccactgttccatgggcaccccgaggatatcggtatggagcgccgtcttgctcaacgagaacattggcgacaaggtctgctgaacgtgaggtctcctcccgttcaacgcgccgtgcaggtctatatactctgggtgatggcagatgtcgaactggctgacggtaggatcctggacgaacgtcttgccgagtttgtatccccacgaggccctgttggtcggggtgacggatctcgccggggaaccataaggacaagccgcttcccaccctctgacggtcgtgtccaattcctcgacggtgcggtaatactcgccgtcctgtacgaacgtttccaggtcggaccgatgatcgtacccgatgaacccggtcggaccgtcgtggatcccgtagacgacccgcatgtcttccaaccaggtctccatcccgtaatccatcaagagctcgatctgggcttcgagacgatcgtccgctccgtcgatggcggcaccgtcgtacgtcgatcgggtacgaacgttgtgatgcttgattgagatggtgaacgtgtcctttgcctcgctcgcacggtccagccggcggttcagttcacccggggacaaggctcggtacaggtacaagtccttgttgatctgatcatattcgtctggaagctgtacttcgttcaggctgcgacgaccgggtgaaccacgttcgtgatcagcgtgcgatcggacgacctggtttccttcgaggccgggggggtcccttcattacccgactcacacgacgaattcccaccacttgtcaaacccctttggcggcatcaacccgttgttcctccgtttgtactcttcgacggcctgtttcaaagtctgactctgcctctgcttcttgctctcccactcgtcccttgcctgtttgatcaactggtataccgggtgtcgatccacggggaccgacgtgttgaccctcaacagtccgtctgcgacttgatggtacggtgattcgtcgaccacgtgtctcggtagatttcgatagatgccgactttcggatgaaacaggtcttggtggtgcacctttctcgtcgatttcttggtcgacgtcgtcctatcagccttgtcgtcgctgttgttgttgttgtccatccacttgttggtcatccagaggatggcgacgaggaggaccagcctgcctacgttcttcccattcacccaccctgcttctcctctccgtgcgcgttccctctgtttcttggctctcaccgtggccgaagccgtgcccgtcgatttcctcctcgtatccgcgttcaagacgtccacggtcttgttccccgtggtcgagcctgtaaagactcgtctgaggccggtcgggaggatccaggtgagcggggtgaggacgttgatcaaggcgctgttcttcttcctcctcttgccgtggccatgatcatcatcctcgtcgtcatcgtcattttgcttgtcataatccggtaaagcccgatgatccgtgggcgagttgtagatcggggaagaagtatccctctgttgtcgttgtggggaagaattcgagaaattcctcgcatgcctatgccaaacgtcctgacgcgctcccggtacgaccccacccctgtacatcgtcgtcggggtccctgccgtggcgatcggggtggtattcaggggatcgatcggtggactgtccagactgatcatcacgggggaatccccaccagggttgcccatcctctcgcggtaagtcgatcctgctacattcgggttaggagatccaccggggctggcgggtgatcccgacctcgatctcgagctggtgaacccctcctgaccgagttgaggcgaagtgtagccgtcttgcgaggggtatcgtctcgccctggatttcctcgctgggggggtttgaagcgggttgaaaccgttcggcaaggtgggtgatgattgtccaaaatacccatctcgatttcgacctagggatggtgagttgaagggagaggccaaggcggggtcgtacagttgttgaggtgagcccggttcgccttgttcagcgatggacggtcgggtgaggatgaggtcgggaatgatgggctcggacatggtgcgaagtgtggcagtgtggatccaggtcgatctgacgcagatgtcgatcgcctcgcagctcgctacctacttgaaatcagatggaatgtcgatttgcgagaaaagatagtagagtggtttgataaaagaagacaggtcgtcactcgatgtcaagatcggcaaggtcgattcggttcgtctaactgattgtcaaacgcgtcgaggtcgacctatcgaggaagtgaattgtcaggaacaagcgtcaaattcaagacgccatgcgatgcgatggtgatcgaggtacaagataccagtcggtgtgaaatgattcctacgcagtctgacgcccgacgccctttcaacctgccattcagttgtttattggccagcccactcgcgattcgttgttcatggcttcatggctgactgagctgcttgctgcttgcttatccttatattcaaacgacaagagcatgtcacgatcaccaactcgcgaccctccggccatctcttgatcaaatcaccgtagtttacgcgagattgattgattgattgatttcccccggaagcggcaactttccccggcccgtgcgggtcgactgcccggacaacccgaatctattttctagcgccggaataatccgaaccaacagttcccggtggacgccaccccgaagtcgatcacatcacgtgacacatcattcgtttcatcgtccccgtatctaaaatacaggcggcaacaccgacgataacgtgaaaccaggaccagtaggagtataggccggattgctgttcatccctgacatcgtcgaaccattcgaagtgaaagggttgtcgctcgtcttgcagctttctgtccacgagggaacgaccgaacgcgcgtctccccgttgccaggatgttctccaagcccaatcgagcgcttctcctctctgttgtgagtctggatctcggcccaaccacagcctcacctcactaatatccgcgtcgtaaaacaccttatcacagaccttcctcaaggcttccgcagcttgtggattgttgtgtccgtcagccgcctttttgacgtcgatccccgcatccaacccttcctccttcatatgtttacagagatgtttgaggattgcaatctgcataggggcatccaccgggtggccttttttatcgaatgtcaggaacttttcgatcaagaccgaaacgttgactgcatcaacatgctttgttcatctcagctcggcgcgtcttgtgctctatgctagagtgtgcaagggaagactcacgtttttcgatcagtccgtccattgtacgcaagaccaacctggaatcacagggtatccgatcagataatatcgaatcagttggaaatcactactattcatcggatcctgaaatcgacctcatgatttgacgcgcgttatatcatgacggcagaggatcagcctctctcgcaaacgccgtaggcgtctgcatcgggacaccccgcaaaggggggtgtcggatcaaaggatctacgtggacatctgacgaggcatatccccatgaatgctacctacgtgagcgggagtctcttcgatagcgttatttccttttctttctaattgttttcgctttagaatgtaccgcgatggatgatccagttgctaggtcgacgaatatacatgtgaatagcggatcgagccacgaaaagcaagagacgtagtcaaatggattgacacgcccaaatcggtaggcttttagatctcgtttacagtgaggtacaggaatacgaggcgcaatggtgtcctatgtgaaaggcgaagaaatctttccggaggtggttcatcatttctcgagactaaagacatgggtaaaagcggtagccaagttgcaggggggtacgacaagactgcgttagccgataaagatgtcgctatggtgactctcatgatgatgaacatcaagaggcttgatatcttcacgctgtgacatataacagattgtacatgccagaggcgagcccagcgcaatagtcagcgaaaagttggagtcgttctctagagtttgacttttgcctctggtccaatgacacacacctcgatggcgtaaacacccttcgaccgaacaacggcctgcttagcaatccaatgccacgtcgttcagttatcaacccgggtgcgaatggtgcttagctgatagacatccgatgccctttacctaaaggtagtcacgtgtactctacgatcatatatcgcttccgcggatctaaatggcggctagaagtagaacgctatagcttcctcgactgccccgatcgtgatcgtgatgtgcacggcatacatagagtaaagctgatctacatcgaccatactctaatctgattcacaactcgggcagtgctgaaagtagtggatacagaggtcctagaatcgacagtccatccgcatatggagccggcgggctcccatacgatctcgtaggtcatgccggacaagtcaaccccaatgctgagtcccggtccaatacgaattcgatgatgattcgctcgaagctcctcgcgagtcctcacgagaactaaaagaatcgtgttccgagatagagcctgatgttcctgttccaggactatcgccgtgatacggcgggaaagtacccatgtttatccaatattcgaagtcattgaacaagttctgctgagcgtatcgcatggattttagccatgttctgcttatttggccaagttccaattgctgaaacatctccggacaatacagcctcagggtctcacccacttcgaggctattgtagacgggatgaaactttagatgctggtagatatcgatcaaaatcctgaggttggtatacggttggcatataccattcatagtgggagtgtaacccctcatcttgtcacattgcatagggtaccgacgcgccttgatggcgagctcgagcaaggcttcaagtgaagccaaagtttggctgcgatcaggagaaattcgcgggaaatcttcgacaagcgagtgatatgtgtttcctcccgctgttgataacttgatcgagttgaccagtacacccgcgaagatatccatatgagcaggtcagtgacgctgatgggtcaaacattaagcgaaccttgataggaggtaggtccattactacatttttacatatatatgagctcggcagtcgcgtgcttatcgagctgtgcgagaagcactcccaaatttgagaacgctgagtggttcgaggaacgttttgcgacaaagggcgcctccttgtaccacggattaccgggccggattaggcaaatgacatgaaggagctcatatttcggccggtattatcaagcttcctacggtattctgtagcaagccctgagaagacttacacctgctgtctcccaggtttacacagcccatcaaagaatatcgcgtcaagtacttccctgattcaaactgccgacacctggtcgttttaagggccggaaggttctggtataccactacccagtactctcccactctcacattgttctgcgtcgcaatgtgctcattttccgatagatcaagagctgctaggcgattgagattccctctgttggcacacggctcgtacaccttcaatgactttctaatttcgcatctcattgtgtaaagcgggtactggacctgccctgtctctccgtacgggatgtttgcgttctcgcatcctcgtcagtactcatacttctgcttccacgctctgcacctcaaggatcgatcttcgccacgtatctgagccaatcgttccgtaatcgagaaagtagcccgtgtcaacgtggcaaagacaacaaacatgtacgtagctaattgacgcctataagcaacgccagatcggacgtgtctgtactgcatacggttacacgtcctgtttcgttcccgctcaaaccctcacatcagaaagccctcaaacgccagccccggatattgtcgctcggcctgttatgctgctgaacaggtctgacgcttgatcgatgatggacctcagcacgaccgagacggttggtatatttgccaaccccaagcgagggatgttgaccatttaaattaaataaataccggtgatacatactacacgtgatacagcctcccagatatccacaggctgtgcacgtggcacatcggcgtgaaacgaggagtatgagcagtttcaaacaataactttcacgtcatgtgtctatgtctagtagcagcgcgacccgggctgggtgatttcaagccaacgacgctcatctaccaggtttttgagctgaaagctattctcatcgaagacgaacgctacgtcaatgttgccgttgtacatcagtctcacttccttgggataattgctatcggatcactgcgaaagctatcccgcagcccgtcaattccgaaccgagaatggggggacgtctttgtgcagcggcagtatcaacgccacatgtgaccggcgctatcacgtcaacggccctcatccggataggaaaatcagttgaaagattgctgagcgaatccttcttcagaaacaattcatgtcagggtcgtcctctatggtcggatccgatgcgtttgactcgcgtaggtctttccttgacctcaagcaactgatacggacaggtctttgaccagtacaagcacgttcccacaagctggtagaattcccttcacgcttacatactgacttcatcagggcgtcttctggtcagaatttaccacgtgcctcagaatctcccgggaaatgacggtaggtggcggccgacgccacggtggtcgttccgcatgggggtgaaatcgtactgcccaccgctagcaagcagcctcgtatgcgattcctttcgttgcattcactggcggagatgcaggatactaccatcacgaccattcgtcctggtagtcggccgagaaagccgccagccctgtcatcgaagagctgcctctttgtctagtagaagaattccagccataacatcatcgcaaatatcagcatagagaagtcgacatagataagtcaccaacaaaagcatcttgactatacataattatcttgcgcgaactggaggtcagttcgtagcagtagtggaagagtcgccggcagaagacagccccaaggtggttttctccatctcctcgagggactctttgtaaatcttgtcgtcgtctggtaacgagagaccactcaagccgttgattgtatgatcatcaggaacactttctttctgtttccttgcgatggccatagttcgtaacttccaaatttcgacccggaagtgtgaagaggtggacatccaagggttccaggtattccataggtgatcgactaaatcctcaaactggacctcgtctaattcggagaatttctccaataactcgtcgataaacttcccaatctcctttgcgccgaatccctcgtcctcaaccaaacaatagagtgaggactctagagacttgcgcactgtcagattgaaaggacgttaagcttcaaccaatcgggcgagctggtatgactctggctgtaaccatctcccagcttcttacttacccgtttgcaacgtaaggctcatgtcttcttgttccggattcattttgcgtaaattcgcggattcaaacctattcgtctatagctttgtatgtgcgagcctaggataattgcaagatggagggacgggtgttatcgagagcacataagtagtcagactgcgaccaccattgtcagcatgttcctttgttatctgagtgcgtgatcaacctggtttggttttaccttgcgacggtcactgggtgacgcgaaggtagatggattgggaaaaggatggcagtcattgcgtcattatcgatgtatcattcgttcagatggataatcgagccgacatgggatgagttgccaacgttcgcgaaagcatgagagtaagcagcacttcatgttgtcattgatacataggatgtcatataattcgccatcaatatctcccacaccgtttggcggtcatgaaacttggtgtcaacgggaaagcgcgattctccacatgctttaacctttcgtagtgctcggcgaccatcactgccagaccagatgctgtttttctgcaacaagttctgactgctcttggtcgaaatatcctgtccgacagtatcatcataacgaaattgcccagaacattcccgtcgctagccggccctgtcaacaggtaatacctcgatcgacgcgctcgacgatttcaaacgatcgagggagtgaccactcaaaacacccaaaaggcatgatcattttatgtactcgagtagtcacatttccagccaaaacgcccatctaagctttcaaggggtcaactagccctcgaccaaagttatagcctcagggtcgacctcgatgtattctgaacgatgtcgaacctcttgccgatactctaaggagagaacgtcccggaggtgaaggaaccagaagtggcttcgggattcgagtgcgagttgttcccggaggaccccgtagcggtttggtcatcgccggacgtttgcctctctaccctatctttcaagaccaataatatctctcgttccaaaggggtgagggatttttttccctcaagtatctctacgcttaaggcattcagcttctcgatcttcaggcggaaacgctccgaaagtttctcccacgcaagcccccacgcagacaagtgcacggctacgtcctcaaactgcttttcattcaatttccccagctctagcttttcctctaccttttccaggaatgtgagcatatccttggctgcgggccccgtattattgcgcaggcccaaaaggatattggacaacgatagtccgactgtcgaatgagaacagcaacactggtgtattcttagtggtctttcatgacatcattgagaaagaaaatctgatcgtggcttaccatcgtccattgtgaggaggttcaggtcagcgatctccatgatagatatagcacacagtgtcaattctgcgacgttgactcggttcacttggtgtttttttgggggggtagtttatgccgatgtcttccacaggatgatgaagttgaccggcatacatatatatagtcattacgaatcacgccgcatccttgttatcctttgttaaaaccacagcaagtctcgcggtgttattatgcacacgtcaggaccaggtcgacttccgttctgactgcccagatgtagcctgcgacagggacatcgttctcacgcgtttcaaccgtcatccgaatcgtcgcacaagttccagcctggacagtccgaacagatgttctcatatttccacggggtatcaatcccatcaggtcactcactgcatgatctagtcaacgatagtcaaatgctcaacgacctgaaacgcataaaacgcatattacgtaatctccgcttcaccgtcgaaaacgcatatctaccgttccatcgggggtcacaccaacttctaggactcgaccaaagttgaacacagtcagggtcgacctcgacgtcatccaaataatatcgtcactccccttcatcgcgtctggcaaccgtataacaatcaaggactgccccggatgaacggtcagaactggtacggtcaaggtccgccccctcaaggcggtccttacccaccgaacggagccggccgacctcgaccgccgcttcctccacaggacaatggctttcgacctaactatggcgggtcgcctatgggaatcaaccagggtgcacccaacggacagggatacggacctcgtggtgggcagatgaatggtggaccgatgggaatgggacccggtgggtatggcaacaacaacggaggtggaccaccgatgcctccttccaactttcgaccgggtccgaccaaccttcctcctcgaccggcatacggtacaccgcctcaacagggttacaacaactctcccatccctggtccttcgagtttgaatgtataccccatacctcaagcggtccgaccgctcgaccctcgcctgaacacccatacccctacccgacctaggtggaggggaagggaaggggaagggggttgactctggcagagtgagagagtgtgagggtcgactggcagaggctggctggttggctggccgagaggtcgaggcgaggggaagcagccgtctgtgtgagtatcgttgactaggagcaggaccgtgggtcggaccagaggttagactcttcgcagacgacttttccgaacctttgacacgcgtccctcccccttcccttgccacgccttgatcgctatctccgacgcgcgcgagaaagtgagagagtgatcaaaatccagaagatacgcgtcgcccatcaaacgacacatctcgcgtttcatcacgatcgggggggaccgatcaaacgggggagggggcgaatacggacgcatacatgagcgagcacggaatgacaatcatcaccaaccacctcgtatctttgtttgccgattcagtagctgcagactgtctcgtcgacgtgtcgccgggtcgaccggcccatgaccttgccgcgcgtgatgatgcatgtatttcttcatgtttgtgcattgctgctacgtctatatacatatatgcacgtgcacaccgtcaccagagtccttgacgacccaccctctaacaataccttaggccacggtaggcaactcggtgtaccgcgtcggcacatccttggtctgcaagtacctcttgacgtcctcgaggggtacctctttcctgtgaaagatacccgcggccaatccggcctcgacgtcggtggcctcgaatacgtctacgaaatcctcgaccttgccggctcctgacgaggcgaccacggggatcgacacgttgcgcttgacgagcccgacgagatcggtatcgaaccctttgcccgacccgtcccgatcgaccgagttgagcaggatctcaccggcgcccagacgttcgacaccctgggcgagctggacgacgtcgacgtcccgtacctctcgacctccacggatcgtacattggtaccaccacgccttgccccgttcttcttgccgggtggccgaggtcgcttcatccccgatgacgaggcaaggtaggtgttcctttgggaacttggatttccactcggggtccgacgtatcgacgtacacccgcttgggatcgatcgagacgacgacggcttgactcccatacccctcggcgatggtctcgatcccggtcttgcccgtcaacgctcgttcacccgcgcgttcacgctgcatcatctcttccacggcgatcacggcttcactcccgatggaaaccttgtccgccccgctcctaaagtacgcaccggcgacctcgagcgccgatctcgtcgtcccgtccggatcgaccgtgtccttgatcccaccgcctacggtcaggggcacgaacacggtctcggccgccgcgcggacgacttcgagcatgggttgatcacgtagagccgagtttcggaacgaggtgatgttgaggaaacaaatctcgtcggccatctcgtggtaatacctctgggcgagctcgacgggttttcccaaatttctcacatcgccctcaccagccccgctagccccggtggtggtggtggtgaccttttcacgaacgtcgtattgatcccccttggtgacgaccaggtctccgttatcgttcgacctgacgtccaggcacgcgacgatccgtttcgtcaacctcctcgcctgacgaccctgcttgacgctctcccgtatccagcgcgtcctcgacctcacgcgttcagggtccacctcacccgacaattcggccggcgtcgacgtcaaccaacgtcgcaagaggtctaacccggccggtccggatttctccgggtggaattgcgtcccaaggacgttgcctagtcggacggaagagacgaaatcctcgtccccgtacctcgacaacgtgtggacatagggggccaggtcggcgtccttttcttcgtcgaacgctacccggaacgagtggacaaagtaatactgctcttcgtccaacatcaacttggccttgccttcttgttcctcccagcacctccataccccgttccagcccatgtgggggacgctcttgtgacccccacggacgactgtgtcggatttggaaaacttggtgacaccgtgggggatcacgccgagacccttggtgtccggggattcgagggacgaggcgaacagggcttgcataccgatacagatcccaaagtacggtcgaccggatcggatgtactggataagaggttcgtacaggcccttggagtggagggatcgcatggcgtggccgaacgaacctacaccggggaagatgagtttctacagcggcagaggcagggtcatgcagggtgagcttttgacgcgactcgtccaccgtcgacatcctccgccgccgcggacgcaggtggtgaaactcacctcggccttgtcgaaatcctcaacggtctggatccattcgaaatcgtagcctagcttgtgaatcgagttggccagcgacctgacgtttcctgcaccatagtcgagcaggtagagtcgaggtcgttcggtccgggtggatcccgaaggattggggatggagggcaaggggaggtccatcgcggcgaatcaaggtgcgtagttgctctttgagaggagatgataggtgatgaaacctcgtccctggtcttgcttatatgggctgctggttgcatgtgggtgatcaatccgaaatctcatcggttgactcgatagaggtcacagaggtcgagtggcgggagcaaagatgactcgcgaccgacttgttgaggtctatttccaccaataacgggcatggctggtcttgtttccacctctattacgttatgctgtgatgatgatgacgccaccacgaccgggccggtccccgttgattgtcgtcgtagtcgtcgtttcatccagcaaaagcgacaacgtgcgacacacaacgtgtagtggatcgtcttctcatcctgctgccccaaacggcgatcgggaaagttcatcagatctcatcgggaagaaccttgtccatcaagagatcgcggggaaactcgtcccctgagcctcgctcttctctgcccgcttttcctgaaacgcgctaccccttgatggtcgttgtgcgtcgtgtttgagggtcattttgatggttgtcatcatcaacgacacgtttcgatcagatcatcctcgatcaactcacccacagttgtatcaacgtatcaatcaaagatacgtccgcgatccgtcgccgtcgagttgttctactcttgcatctatgatcaagacctctttcagataccgacaagtctcgagtcgatcgtcacgtcttgaaccaaggtttcgagctgtattgactggactctcctggcaggttcagagacccgtggccatgtacttataagctaaaggaactttccaacgcaactttcgtcgagcggtcagtggcatgcgagcatctccaacagaagattcgacaacagtccaggaccagaaaccatctctcgatcgcaagtctactctatgagacccgttcacaccgctgtaagatcctctaatgacctccccacgatcctcgatcatctcttccgatagctacggtaataccctactgttagctcttgcaataatatcgacaccggacgacctcggcaccatgagagctttcgcccattcgctacacgtcctcatcagcccgacccgatccaggcccgagacgatcgatcgatccccgtctacacctagccggaggtccaagtctagagggaaggtgaataagcagggacagggtgccgggtccgatgaatacgggagtggcagtggcagtggaggcagcgagttcgagagacacgctcaaaaggagcgaggaccgcgtgaagatccctcgacggcgatgacgacgtggacgatgttgggcgggtcggaaaaggagaatcgagttgtcccgctgtattcagctacagctacagggagctcgacgatgggacatgctcctccccaggtagctagggatgctaacgaggtcgaacccagaagacccctcgtggagctctccaccgtcccatcggcatcggcatcaaccacgacctcgcctcaccctgatttccctcaaaataaagataaaccgctcccacccctcttcgactcgacccttgaagtaccgcctacggacaagcgggatccaccgacggtcagctccaactctcgatcggcgaggatcatggacgcttggaatccacctgccatcatacccctcgagggacctcgggaaccagagttcacaggagggaaggacgtaccagagacatccccaggcaaatcaccggtggattgcgtcgtcccgagacccgtcccggtggacttgggaagcaggacgggtgggaggaggagatcgttcaggccaaagatcaaattgagcttgaaccggggcaagacggtcttccagcctcggctcaaggaacagcagaggaaggtacccccggatgagcaggatcagtccagacaggctgacagtacaataaatggtgaacccattagtaccggcacccgtacaaggaggaccgcgagaccccccctgaagccgaccatacaaacaagttttacaacaacggtagacgaggaagggctatctcgtatagaatcacacttacctgtcataaccccgctccaatccacggtaccgacgcctttccaagcatggcccagccctaggtctgggccgagggtaggattgatagaatctgagtcgacggtaagagcgggaagggatgagggcgaacaggcatctgctgaaccgaatcgagatgaaccatcggtgagtgtaggctcgacggatactgtatagcatcgcagtcgctaaaataagccgagaacataatatagcatggcgcttcaacctcggcgcaacctgtcgaggtcgaagctgaagctcgcccacgaacgccgatcaacacacacctgttatcgctctcgtcgacacaagaggaatccccctcgagagccttagttcgttcggcaagccgtgtagagatcaaaagggtaccgagcaagaggatcaagttgcaaggtacacagtcgccttacgaggacggatccagagctagggtcgtcagctccacggccatatacgatgtcggagatacgagcacatcgtcgactcctcagaaaatgacccaatggacagacgtctcagagtcatctccacagcttcagtcgccgttgaagatcaacactaccaacctgaattcagggtacagtccctcgtcgaccggctcgacacgggcgtttcattcacaccagagggtcagcgagatctttttcactccccctaccagtacggtcgacagtcaacctccttcccgaacaagcgtttctgcagtggcgacaagaagcattcctccactaaagcatgctcaagaatcgtatccggttccggaagagaggaggcggagtacgagcctcccaagtgacctggttcgcgagctagaattgcaaggtgaagcgctacatggatctgggagtgggggattcagttcaccgggccagtcgaatcatactacgacgccgatcatcagggtgcagttcgcaacgacaaacgggggaaacaagcaaccggacgaccaagagctcctttccccgcctcctcgtagttcgtctcgaatcgtcgctggtgaatcgccaacagccgacccaagacagctatccttttcatctcaaccgaagcccgaattgagcgatctcttgccagagccctatgatagctggccacttcttgaaccggtgcctatctcaatcgcgccatctcaggaagtcgaacttatgtcagacgcggctctgaaagccatggtcgcggggatgggaaccctcccatccttgatcctgtctcagttcgaatttcaagttctcgtcgaggcagctcaccgactcaaggtagtaatcgaagagcttgccaagaagcacggtagcgagatacgacgacgccgtcgtgctttgctatatatgcagcaaacggtcgccaaagccgaagttaaacaatgccagcgcgtcgtcaaggtgttgtcgcgaatgaccgaaggcgtcgatctcgatcagcagcgactctacgtcgctcaggatcagctaagacaggtggaagacttgatcggaagccatcggcaaagggtcctctatgctgcgctcgagagatgctccgcggctcgtctccaaatgagctccatcatcgactcccaaaagaaagatgtcatgcggcctagatcggctgctccgatcgatgccaccataccgaccagtcttacaaatcccgacgcctcgtcaacatctttgggaaaagggtcaaagaggaaactgagcgttcggttcgaggcgagcgtcagaagtacacccaaatcgtcataccgtcgaagtagtaagcgcgcgagcattagactacaagctgtcggacaaagagaatcagcccagtcagcgttgagcgtagacgactggtctgtctacaaattccctttacccccatccagtaatccgcgcaccgacggcgcggtcggcgattgcgaggctgaaatgccggaacagcaatcagtcgagtctgccgctgttgatggcgattatccgatgcgaaagcgacacagcgccagagtatcttcggtcgacatcctctttttccgtccaggttcaagtcggggcactgagcaacatcacgactttccagaatcgccccattccgatccgccttgtcgaatacgtaggtcgcattctgaggagcacctagaccatcagggacgctcaaccggggtcaagagacgatcgagcttgaagcggctgagaccagacaaaagaaattctggaccatgccggcattccagctccccagagcctcgcgaggcaagtcaacccctgtgtttggcaagacaagcttctgtggtggctgataggattatccccttcctcacgcagatggaagcctccatgatggcgctctgtagtgtgcgccccctgtcaactctcatttaaagatggattccagcgagattggacattgcagatcgagcgacaacgatgtatcttatatgacaaaacggcttgcgcttgggcgcgaaacaactcggacaatttggacgtgatagaaaacgaagtgtttgagatgacgaaagaattggtcaattggaaaagcagctgcacctgactggctgccccaaccgtttcctaccacatatacaaggtcctgggcggatggtcggcggcctgaagaggcgaagattgtgtgacgagatcgaagtggggtatctccttcctgtcgctcaagccgagtggtgcttcttgataaagttgagacagttcttggcgctgtgagacggaaaccgagatgagtatcaatgccatgacgaatgtgcgggagcgactgctgcttactcgtcagcgggcttgaccttggtcttgccttccaaaagctttccggtacccttctcgaagataaagtgagctcggacagtgctagaggggagacgagcgtggcatgagcgaagcttcacaacatttattgtactcgtagcgtctcgaaacctacttcttggggttggcaaaggcaccgagcttcttgatcaattcgctgttggggtcggagagcaaggggtaaccgaacttcttctcctcgttccaggactcctgcgccttggggctgtcggtgctcagctaacgatccgatgcatgccaattagcgatcggaactcgatgcgcagggtgacccagaagctagacttactccgtagaccttgtaaccgagcttgccgaaatcggcgtaagagtccctaaagttacaggcttgcgaagtgctgatgcgagtcgtaagatattagcacctgggatctgaactttgcgatttagcgcggtactgaccatccgggagtgttggcctgatatgcagtatgaaagtcagcgtttgagtgaactgagcggaaaatgtcagcgacacaccttgggatatgtgaaaaagataacaccgtggtcggcagtgaccaaagagctgacgtcgacatcctggtccttgttgtccctgatgatcgtcggcagaggccgcataacaaatcgaaagacaaggacaacgcatttgagatcagttggggaaaaaccttcgtcatcatcaaaaggagccgaaatcccgtacgcacttgagcgtgatcttcggcagagtctcgccttccttcaaagctccactctgctcgggctcgctaccctctgcagcagcctcgatttccttcttctcagattcactctttcccttggggtccgcgtccatgttaacgtcaccttcctcggcgatggtgtcgaccttcttgctcttgggcttagcagccgacttgggcttgtcagcagcagccttggatgtaggtttcttgctggcaggcttagcagaagcggcggccttggatgcaggcttgtcggcagcagccttggtcgaggcaggcttcttgctggcgggcttatcagcggcagccttggtggaagcgggcttagcagcggccttggtcgatttgggcttttcagcttcgtcctccttggtctttttgctggcaggagccttggcaggcgcttcctcagcagctcgcttctgtttgaaacaagatcaaaggatgcgcaaaggacacgtcgtatcagctttctatcgtgacgtgaacgacctgacgcgatggggggtcctcgcgggggcattcaccttggaagcgggagcctttgcaggagccttggtcgattcgggcttgtcagcggctttcgaggcgggcttcttagccttggtgctggcaggcttcttgaccggcgcaacaggctcttccttcttggaaggaggaggctttgaagcgacacgagaggatcgcctaggagcctctgcgggctcggtggattcagtggtcttcttagggggcatattggctgagtctttagtgatcgtcaggtggtgatgaggtatcggcgtggaggaagttgaattgagccgatgatattgagcaggtatggctggtgaatgaggatttgatgatcgaggaccaagagtgatgaccggagctgtgaggtaagtggtccggtgcagagagcaacaactgggatgatgcgacgcggcgcgtggcgccccacacgatgatgcgaggctcaagcactttccacttcaggcaatacctgacaccggtcgactttggttcaacgagccttcctcattcaacatctacttacaggcaactccaaacacccaaagatgaacagcgagagacactgtttgtgctagtcgctctcgacgctgaagggattcactccgggagcgggactggacgcctggccaatcgcaggcgcaaacagctgcagggtggtggatttacattcccggctcgatcgccaccggcatcaagcgcgagctccgcgatcgagaaccccgtcgaacgacattgacattgcgctcggtatcgtgatccgtggtcggccggaatgggtgaccatcgatgaccacaattcgctcggccacatacgagcgcaaatcctctccaaccgggatagcgacgccaactagctgccaccgctatcggctggtcgccgtccaccttcagaagaaagcgcacgtttatgacgtctgtgtcttattacaggcgtgaaatcacctcatccgtacgaaaccacgccgaagacgagtccaagcagcagctcattcaacatagcccctcatgtttcaatatcagtccaaaacgacgcgatcgctcgatgtcttggacctattccggccgagatcgggattacgcgcaaatagcggacaggtcaagctgactgattaatcgatgtacttacttgtcccaaccgaatcgtttcatggtggtttgcggagcacgacccacgtcttggaagactgagtttgcttgatcgtggtgtagggctgaatcaaatcgaagacatgagaggtaacctagagcgatacaattttcttgccagaatcaagatcaacgagaagtggcgagcagcttgacgaacggttccatcaaggtctcgatgatggaagacgtccagaactcatgctgagagtcgtgaagagaggtcatgttgtgggcgcactcgtgcgcaatcgtgaggaaccaagaagtccaggcttcttgcttgacgccgctggccacctggttgtggtgccatgcgaggtaatatcgtctgcgatcgaaattcaatcagtcatcagacgtgttctgacctttggctatgtgttttgactgacaagttcatgaaaaggctgccattgcggttgaaagcgatgagagggcccgcttgatcgtaaaacacgttgagcgtcgtcggttccagctgcaaggtgaagcggagggcatagggtcagatacgatcgagaacctgggagaaagtcgttcacacctgaaagacagcggccaacggcaataaaacctctacggcaaacgttttcgattcgttggccagggttcgaatcgtcgcctcggggttaggaacatctgcaagcaaaaagatcagatggattcgagccctccaagccgcacaatctgctcacctcggctgacatacaaccctaaagtcgtgccaggagcctgtccagcaggtatcaagttggtcttgactccagtgttgtcgcagtaggtgtcaccgctttctttgaccatcctctcgctaggctcgctaatgatatccgacttcgaccggttcggtcgagaggcagcgattgccttgagagcgccgtctttaatggtcgccatgggcgttacctgagttccgatgcctgtgtcagcggagagaccacagtgtgcatgttccgccagatactgacctggttactggcgggcatcggttgaggcacgttgggagaagagcccgtctgattgctctgcggcctgaatcttgcctttagctggttcataatacccgagctacgtaacgacatctcgtccgagggttttgaggctatagacgagttgtccgaggagtttcgaggatttcgcatcagatcggcttgagcgatcgattccttgacatcagacacggcctgtagagccttctgttcctcttgtgatttcttctcggcttcggcctgtctttccgtgtcagccactcttgccaatctctcgatcttttgctgattgagaattcggtccacgttgtaacctcgtcgccgcagaacgggtagcggtgcctccaagatgctatggaagatcagaacatcctcgtttcggcacctcttgagcaacacgttgcaaagcgtaagtgcaaccctgaaaagcgaagaaaattcgattaggacttcgacctcagccctgcccaacctgccgtcgcgactgtctgcaaacttactcgtacatgtccagctgcatacgatacgagatgtaaatcctaatacgattgccagtgctcctgatagaagctgctgaagccggttcaatggacgtcctctctgcctgatttgtcttgatagtccgcttgatctggatggtatcagcctgcaggacttgcaggttctccgcatctcctgcagatcccttgagccaatcgatctcatacttgctcgacgcccggcgatcagagaggaacagagcgaggcgttcaagcacgtgtttccgaagcgtgacagctgcgtcagtagcaccgtgagtctgaccgagagcacgatgctcttccttgatataagagcttaaagttttgactcccaattgcatatagaaatcctcaagcagagtttcctgcaaatcatcatcagtcatcgtttagcaatttgcccttgaagtaggctcacctcgggagcaccgataaaagcgtcggaaaataacttggagaggtaagagtcgtcgacaatcgccagatcggacgctcgggcgagaacgaattcggcttggccgtcctcttcacctatgtcgcccgggctgacaggtgccttactagggactctcttgattcccatcaagaaagaagcccgagacatatcccgctttaggtccaatgggaatgaagggtaaccggttgcgagtaatcgcaattgcgaaagatacctatcagatgagcagccagtcagactaatctgtcagttaatgacaacgatctccggccaaggcactgacttttctgcagatgccagttttcgcatcgcgccgtatggatcaccgaccaacatgcgtgcaatctgttcttgagtcggttgcgctttcacgccacactgttcgaggaacaagttgccagcctcgaaatcaacgaaattgtacaggtctttgtacagctggtacacctctgattgccggtctctcggtgtgaaaaaggtctgcaagggttgcacatgagggcccagttccgtcggaataaaggcagcagttgagagacggggtatctcgcggtgaagatccggcaaacgtgttcccaaatatctgaaggcaagcttgccttgctctatcgttttcggcggcgtacgtgtcagatactgtaccaatacagaaacaggagggtccttgaggagttgcaatttggcagcgacatcgcttgacagctggtttaccactaggcagtcaatggtagcggccgcttcatttgtgtatacttcgagcggccgagctaattgaagagttccgccaggcgttttcgcagggatgaatgcgacatcgccggcttgcgctggagcgttgaatccagggtaatggcgcagatttttcacgaggtaatccagccctttacgatgttgatcggggtccgtgcttgaagctatgcgcagaacgtccgccagactggcgtacttacgaaggcctagatcatacataaaggtcgcctcggccgagaaaggcttccaagggtgatcaccgtaatcaagcacattgactcccaactgcttgttctcttgagtcggttcacacagcgcgtcgggcgtagtgcgtttaatgggcattgccttatctgatggtgcacgcgccgaatcccatatcggaaacgccgctgtccttttcaatcttgcaaactcgtggtcggacagtgacttgcggaccgagctgaggtatttgacgagctcggcgcaggaccaaacggattttccgaccagcctagtgaagatcaactgcaagtccactacggatcgtacgccaaggtgatccaacatggaccgtaaagcccccttgatcgaggcatggggtagagaaatgacaggaagatcctcgaacatcgatacttccggatgataagactcgcccggctttttgaagccaaggcttgtgggaatacagctgacttcctgaagggttctcttgacttcgtcgcggttcacattggacaaacgaggccatgcacggcccaacacccccaggagacgctccgccgcatcggctgacccttgaaagtcccgctcacttaacgtcctagcccattcagcgattcctagctcatgccatccaaagatgttgatcatgtcggccgactgaagccgcttcgagatggtgtaaggcgccgtgcctgcaggtagaggtacctcggccggtatcatattgggattcagaaaggtcttgatgacgcctaacgaaacgatcttctccacctcagtgacagaatccttgattgtgacgaccgtcgcttccatcagacaatctcgtatcgagctgttatattgagacaagttcataatctgcttccaccagtcgacgcaggcgaggaattggtcttcgttcagtggtgcagagttgagctctgctatgacgtcggtaagagcaatgtcggacaacatgcctctctccctgagccgtcccacgaacaagtcggcctccgattcgagcgttcgagctagcacgctcaggttgggtaagaacttatccagcattggatttgctagccggactttgtctgcgccattgacgcccatcgtcgacagtaccggaatagccgcatcgcccaagctcgaaaagaatgccgcctccatgagttgtgagacttgagccgagggagtagatcgcttgaaagtgaaatatttcatggtgtgcgcagcctgaccgacgagagcagcggctgccgcggcgtctggggaagcagaatcttcgacaaggtcagctcgcttgggaaggatggcatcccacttttctttcagcgatcgcagctgaatctcgtagacgagacgagcgacctgtccaccgatggacagtaattccttgttccaaacgctaacgaacctgtccataagatcgatactttctcgctcgacggtcgggatgaaacgcgcagcgatatggcctcctagacctgttgtctgaccagtagcttggccgatgaagattctaccgcctgtatctgggttcagtccaccgaatatgtcgtctgcactaccggtctttttgctctcgccaatagccggagcttcagagaaaatcaattgtagtaccgtggatttaggcggcggtttcttggtcgctcgttccagctccctttctaaattccggtcgacagttatccgtacgtctgcctgatacacctgcaacatcattgaagtcgacagcacttctcgagggtccttcttgggcaggacaggcggtggaggcggagcagcagctttggctggcgtgagagatcttgaaaagactgacgaaaacaccgaagcgaagcccatgcctggagccgctgtttttgccttttcgaccgccggtagcggcgcaacatgctgaagaccaacgtcttgcaaccatgacatgcggtgggccgagatcttgacgttagtggtagtcaagccattgagatgcatgacgttctgggacggaatcttccctctcgatttggggaaatcggacaacgggacccgagcgtccgctatgcctgtttccttagtgagatgcagaacttgccatccgtcaacgaacatctgaacgtcccggatcttgttcatgaatgtgagactttgcaccaaaaagctgcgccgagaacgatcagtcttgatccgatctaggataggatttacgtccacctcctcttaccgtgcgaagtccagggggccttctataggtgtggggttccgtaggtccatgctgaacctggtccaagggttgccggacaagctttcagttgtcgacataccctccggaagacttccgcttctagcgaatagctggtctttcccgtctttccaataaaatcccatccatttcgagcccgattccaccatgggggactccgtaatactgaacaaggcgtagaatcctatgagggggaattgtctcaactttcactcaaacctcgtcgtcgcgcaggtgcgtaccgactccaaatgctcctatcttatcgtcatctgggttcccctcggcgatcttccgcaggcgagaccaatcttgatctcggaatgggatgccgtcgttctcaatcacatattgatgtatctagacgcccgatcgactaattagctccagccaaggggacttataacataggattctacttacaggtactttgagcagatcaggtagttctcggttctgttctagcgagcctttcgccccttgagctgtcaggaatctaatcttaaccgatttagcgttcgcatcgtctgcattctgcagcagctctcgaaagattgtgtattctccggaataccgagcgaggatttctgcatggttcaagaatcttcagtattacatccctaatctgcttttttcgttcacatactatcgatcagagctcgctggttgacttctacagtatggtcctccccctgatcccataagcgagacttgtccgccatctttgccggcgccgtatcgtatcgtgtcgaacagttaaggcaagtgagcagaactagcgagtatcctagagtctggctacaaggcctgacaccagatatgaatgcctcggagctgatggtcatctcattcgtggcaaaaacatcagcttcatcgccttcaggttggacgctgagccatcggggacgagcgatcgatgtctgatgatgactaagcaagaaccaatgaccaaagctgcagcgtgaaggaggatatatcgatcaatcttcgaagcaagccagctcatcggcgaggcactgcgaggtctagatactacagaaatatctagaatggaacggaaagactagaagcaccgccaggatagagaccccttgcgtattatagagtcagatcagatcatatcagatgagaataccggcggaaaagaagatgagaaggtcgtcaaggatcgttgagaggggccgtaaccatcggacggtctaagccgaagctgctacaggcttagcagcttgaatatccgtctgagacgaacccttcaaaatcagcgagcagtcgactgagttgtcctctctgggatcttacctgagcctcgacgggagcggtaacgtcctgcaaaggtgcaacggaaatgggaggagcgagctacgatccgtcctggttagtttgcgagactctggcttagatgccggtgcgcaactactcacaataggagccacatcggtcttcacctcctcgacagccttggtctcaggggccggtccggcagaggtctcttcaacaaccgcgccatccttcttgatagggggaggactggcggtcttctccctcttgtctccgaagcgagtgtcgatgtactgtccgatacgggccgagatacgcctgtgcatcttgggggtagaaggagaaggcttgttcttgaagagcatcggtaggatcatcgtcagaatgatgggctttgatgtcatggattcgctagagccgtcttaccagatccttcttcgtctcggcaacgatggtagaggattccttgggcacggccgtcgtctcaccagtctcggtaatagtgactggggcctcagtgctattgccaaagtcatcgtcagtatacggctaccagtccgcccggcgactgaatgtcaggacttacatctctttcttgggctcctcgacaatgttcagcccgttgacaccctcggtcaattggctgacctcctcggtagaaggcttgacggtctcatcggctacgacggtggggacagagtcggtagctgtcgagttcgatgcatcgggtacgagggcggcctcggtcttggtctcctcggtagcagcaatcgccggggcggtcttggtagcagtcttcgagggggtctcagcctattacgaagagagtccactatcagtggcatattgggaacaagtcgtggatggtcgactcaccttgtggatcttgtccttcttatcaggggaagacatgccaaagattccagaaattcgagcaaagatgcccttcttttcctgtagaattgatgtgatcagcgactcttgaggctttagccttttgtattggcctcagactgaccttcttggggctcgatccagcagtagtggtaggagcagcggcaacggcttgctcgtcagccttgttctcctcaacaacggtctccttggcgatgggaataggaggagtggcggtctcgctgtcactttgggtctggactacgggctcgatcttgtcctcggccacagcggtctggacgggttcgctgtcggcttgcacgatcgccgggactgcggcgggggcaacggcctcagtaggctttgcgtcagtcaggtcggccggctgtatacaggaccaaggcaagacggataggtttgatcagccacgctgattggtcacaaccagctcgttgatcagactcaccttggaatcgacctccatcgcgttgctggtgacagggacttcttcctgcttctgggtctcggtctcgatggcggtggggttctggatagaggacatgttgattactgtatgtgtatctggagaccattcgcaagagataaagggaagtgatcagacgaccgcatcaggtttgatcaaaaggctgcaaacgtcccaactcacggggttgatgagaggtatgagatcgcgatggtagagaggagtggacaaatatgaggacgacagaggttgtaaagagtgtagagggagcgtatgtcaaaaatgaggatcgagagtatgacaagaagaggaggaagatggtgagaggcgaggatggtctgggtcagtcgatcgagctatataaaaggctgcctttgatcacgggcgagacgactgtgcgcaaaggaccaggccactcacggtttttcgtgccgtaagaaacgaaacgggagtcttggctgatgttcaagaactaagtctgctccttgctccttgaggcgggacaacgacgacacgacgacggaggttctccttgatccttgatcaaatccttcctctctccctttgtgttttgtgatcagatggatctcgatcaaaagtcttttcttattccctcaccctcgactcatgcctccgcgaagcccgaggacatgtgactcgaatctcccacgccactgttccgacatgtgacggatcggaagagaaccccatcgtgaatggcccagcggcagctagacgagagaccgaaaggacgggctttaccccttgatgatggcgtttcgtgcacgccctttcttatctctgctcacgcgtttcaactacccttccgtgattgcggggtacgagggtttagcgcggtcgtaaatgggtttcgcttaggtatcccgacgggccagtcacacgggggtgacacggcgcctcaaacgctgaatcatgtacgccacggacggcgtttgttgtgatcgatcgcggctcggatgcaattgtgtccagttggccagtctttcgtttgtgccaggaccatttttatacggtcgaccgaaagactctatatacaacgcttgatcaatccttttctccatctacatcaacccattactttgctgcctagtaggtctgcatcggattgccgttgttgttgttgttattgcctgaggtcgacatgaaatcccaccaaagctgcatcaagagcgaatcgtccccgaccatacctgatgtcgagattgggggcgccatggccatcgtgtcgagcggcacagggtatacctgaggcaaataggtgttttggttgaccatagcgggagcctgcatccccgtattcattccgtcgtcgaatccgatgggcatgtccaccttgatcccttcgttctgaaccgcctcgatcccctgctccttgtcccacagagtttgagagctagcgaccagccgcctgaggaatcttgcgtgtaatgagggagcatcggccgcgaacatggaagatgccgtcagagcatcggcagcttccagcatgagatcgaaacagtgttggcgctcagccttttctagtggcacagctgcggaaggagctccaacctggaatgaagacccaaatttcagccgcgctcgacggctaaccgcgttagaagggcgctcacagtgtacaaaaagtagcccgcatagattctgcaagtcgccaatgtgggatggtgagtaaaggccaaggccgcatgggtttgaaacccgcttgctactcacgtgaaatgcagcagtgtgtcgctggcaaaggtcaacaatctcccctgcagcgtttttatccggctcaacaggtcggacgctagcgcgattgagtgatggaacgcgggagaactctgcatactcgttctcgactcgactggcatcttgctctggatctgatcgatctggttgctgaccgttagattcaggttcaagagcaatgcgtccagccagacgtgaggtttacggggctcgctgccagtgactgagaaacacctgtcaatacggcaaaccagcgattagacaggcgaagccactcaccatctgtaatctgcttgatccagaagtcgtttgtgatccgcaaatcctgattcatcgttcgcgtcaagattgacaaggacaccaggtttgatgtagacgaccgagtcgacgtgtcgttctccatgtgactggcagtaatatcaaggatcgacttgtagtgcaaatacttgattcgtagctggaccgaggctaccaggttgatatcaggcccaacttcattcgagccgtggtagaatgttcgcctgcgaaatataccggtgtgatcagtggttgtccgcatgacggaggaaagaaagcctgctcacgagcaggccaccaggaggtcgtcctgggatatcagtagaggcgaattgaactgcatcgcaaagaccgtattgacgatgaatagacacaacctggcagaggaagtgtcagacgctgacggtactgtgtgcagcattgaccgacttaccacaatctttgagttgctcgatgccacctcgcctcttcggggtcgtcaggagccgccgtgtccatccgattcagtttcatctctttagcgatcatgacagcctatcgtcaagacggggatcaggtcaagtctaggatgatccgccgtctctcaaaaagatgcttacacgattaaaacgatgcgcggccttgtcgtcgtctgcttctttccagattgccaacagtacgatcccttgtacgacatcaaacgatgacactgctccatgaaacacggctgcctgatgtctctgcgcgagcgtgaggcatcggtgatgaatgcttttagcaaactgaggcgggtaaggcaggtcgacatcgggtcgagtttccagacctcctcggaaaaacttggccacaacgcaaagaaccgtggtgaaaaggaaaggcgattgatgccgaacccagtcaaaggtatgaatatccttgtccaaaagagggcacgaaatattgacttcggcgaagtatctgcgtgccgaacaggagagtcagtttgagactcgcggggcacgctcttatgacgcacattcgaaacatctccctcgcctgtggctcgctgaggatttcttctgtcagcgggtcctgatttgagtaagggtggtcccaaggctcgtcgtcaccccgatccagccgccgttttttcgatggcagctggtcgtcctgagcaaaatctgtcggaacaactccaagcgtcagccttgagcatccgttccgcgaacgatctgaccaacctcttttcgacaagcgtttatggccgacgacgtcgccttcgtgctcgctctcccgttcgcgatcgctctcctccaaggggtcctcgtctaccggctcgaccatgtgccgcaggctaaacttttccctgctcgacttttgattgctgctgccggatccgctcccctgatccaagggcggcaactgcctcgatgcgtcatgagctgcagcatcgcgcatgatcatgggcgaagccttttctgaaaagcttggcctttgatgcgtcgaatcgccgtccctaaacccggcgttggcgttgagaaagggaaatttcgaactgagcgtcggcaagatcggcgaccttgcccgcctggcttcgcttgtttgacttccaccgccttctgagcgcatactgacgggcgtaggcgcgattggcatgggcaacactgaagacgatgacatgcgcgtagagctctcagggttcgtgaaagagagcggcggcccgttgttgaagctcgatcgatggggcgatgagagaggaaccattcggttctggttcgacgcaacgtcaatgggcaacagtggcgcgtggttgtggttcatgaacgccatgttgtccggtgggggcaagatcggcaagaccgagttgttgtcgttcccgcctcccatctgcccgcgatagccgtccatagacatgcctccctgtggcagataccccatcgtcctcccggtatttgacatgtaatccgtcgtcatcccattcccctgaggcatcatcgcctcttgatgagcgttgccataccctccattgatcgcggggatccatccgacccctccggccccggccatagacccgctcggtccagcttgatccattgccccatgtctgatcgaccgatcgtatcccgaggatgtcgaaccttgacccatccccgagtcgtatccgaccatccccatgccaccgaagccgtcctggccttgcccttgggtctggcccgaccccaagccctgaggagccccagctccagtcgccaagctcaatccagcgcggatctcgggcgtcggcctagcctggagatgtaggtagctgatgggctcagccatcaaaggttccctcctgaaggagcccggataatcgttggccgtcgtggccgagatcggtcgaccggattgatccatccggggaggtgctggaggtcgggtggaagacgaaggtgggcgagagggactggaagtgcccgcatgacgctgtgtggccgagaacctccggctcgtagaggcgggatcgggtcgatccgcgacggtcctcttgctcgacatgggactggattctctcgccgtcgttgaagatttcctgccactcttgcggttcctgtcttccacgctgccatctctggtcttcctttccgatccactcgccttgctactctttttggtttctgccttgccagacgcggataccgaacccgcccgctctgacgtggcccttccagaagtcccttccggtcgttccttcttcttcctgccccgacgatgttgtaggtattcgcacgtcaggctataccgcgcgcagcgtttacacggttcatccgggtcgtcggatgggaagcatttgatctgccgtcgttcgagtcgggaccaggaggggtaacgtccaggttttggcgaggcaagacatcagtcaagatgatccgaggtaagttgagcctcgtgcccagggactgaccttttgaagtcgacaattcgagcaagcactgtatatcccgtcgacgtcaacgccgaatgcagggaaaagagggtatgagtcgccaaaagttcattagcctgtgctccagaccacccttcatcagggcgaacagaatagcggaggtaaagaggtgggcggatctcgacttgcatgatgttcctcgatgaatctccttgaccctgtcctgctcgttgagaatccgattccccgcccgtatcccttctctgactagtgtcgtcctcgggcatgctcgtccagcctgtctctatctcaagatcggatgcctagttcccgtccaattgtctggcgtgatcgtatctttttggtggaggggtatatggtgttgcgagtttgaggcaagagaacagagtttcggaatgccgattattgtcgattatcgctggtcgttgaatgccgaccgagctcgattaccgtgataacgggcgaaatgaggcggaggtcgttcggcgggtgggtcctgtaaaagtctcggtactcgcgtgtagagagtcaatcaaaataattaatcgtgaacttgatcggaacaaaattcaagatcgacccgatggtgaatcaacctaggtcgacacgatcccaaaaaggcagcatttctatgcatctcacacggacctgttctgccctgtcagggcctcttgtagaagcagactatttgctctctacctgtgatccctatgacgattctgtcgtcgagatgccatcggctccccctccctccccacaccccctcattgcctgtatcatcgggtagaagtctaccgtgattccaatttggtcccgtatctcattacgacgaagcccataccgcgcgcggctcgtagcccacctacctctcgctccttcgtggtgcaccccgcgcgcaacgtgacatcttggcgtcccagcgccagccgccatcggaagtttccctgagaaagccatcattcactccttgcctactcggtcattcaagcgccagaccaccataggccataggccaaagaccaaaggccgaaggccatagatccattcatgtcttacggtcgcgatcaacagcgatgcaatcgccactgtgtccgatgtcaatacgacgtcttatccatcaatcaattcaatcaaggagatcctgggtctgtagcttgcggtattcatgtctgcatggacatcttgtcgacagtcacaactggtacccaatgtgaataaagaactaccgacgttcataatcttggggaggaaatggccgacggaatcttccaaggacaagctcgcaacaagtcattgcgatagagatttttgttttcgttgacctgaatatccgcatgctttaaatacatacagggacttcgattccaggtagtgcttcatccgttcgtctcgtccggctcaagaaaatcaagacacgacgcttcctgacaatatcagccgccacccagacgattcgggattgtatccttgcgcacggcaagctctccaggagattgtctgtaattgtgcgactaggggttgatctgtaccactttcaatcgtttggcgcactaccacagcgtttgatgagcaggtgcaaaaccaccgctcggagatcaggtcagggaggaatcgttggtccgagaccgcaatacacccataagagtacaaacttgacaccggcatgaccgtttcatccgaacttgtcacggggagactgaatccggcttgtggaccacgaatgcgtgcacgactcgacgtagctcaacctggcgagcacacatggggtgttacgcgacaagaccagcgatttacggtttgactcggcggctttggtgggcttccagtttaaaacaggtcggcttgcccgcagatcaagcatcatgagaaatagtatacactacatttctcaaaggcgacgtttcaaatcggtcctcaggtatttgagatggctgtggacgaaagcctaaataccggtctcttgacttgataatcctctccagacccgacattatcagccatgatgttgccgagatagaaggcgaacgagtcagtttgctctttgatttctcggaaaatctgaatcgagagtgagatgaaatttgctcgaaagccaagcagcgggaggtgagtttaaacatttgaggagacgggtcataccgtgctcattcaactcgaagcaagaaagcttcactagggttgcagcgccacttgtgaccaactcaactttcaagccgattccatcgaaacgatctggcgtgacatcatcgtcgacgccgtcgctcatcctccagtttccccttcaagcggattcggcaccagcgagcggatcggctctcacgtattacttataccgagtcgggtcgcctttcgatcctcgctcttgtgttccaggtaaaggtgggcttatgtgcgtgactgagatcccgacttatttgcgaatgagtaaggtcgaggcacatcatgaatccccgtcattcatccggcgatcatggctcagaaccactatatatacgaaagtggcaaggacgatggtcagctcgttatatgttatatgcttctgctttcccataagccgttggccggagtgaccaaattgttcactgatggttaagtcacgatcgatcgcagccgtcgcagtaacgtgcagaagccattctgagctgcactttgcttcggtgtcttttgtcgatacatgcgatacatggacggtgatcccggacaggcagttgaagccgcgaaactcgatgaataccgccggtgcgactcgaaaaggtcgaattctcgcctagcccaggtgcgacatggttgatgttcgtcatgcagacacgcaggcaccggtctcctacttcgttggcacgagtaatgatgcgctctcgactggctttgaccgatgatcaggagatgatggaaccctcacatatgcgcatatgcagtcatcctgcctgaggtctacagcttcgcagcacaacgttcgatgtttcgcgccatacgagatgtattttcaacggatgaacggagttgagcgaaacaggatgcacgatgacgcgtaaaaatagacggaaatcccgaaagaagacctcggagctttgaccattttgcacagcaacaccaccactgacaacaacgtttgattagatccgacaaccgattgtagcgagcggtgcgagtcacaaacgaatcgcgagtcaacaacgtataatcgtagctatccacactctgccgctatcgtcaaagccaacatccctctctctgattacatcgtctgcctgacgagccaggtgtgatccccttgtctctggtaggctccgcgtcaaaacgccgaactcccccctttcgagacggacacacacacacacgcaactcgttcggcgaaaagcgagactcgggttttgctgcctctcagctcagcttatcccaccaaaccctaccgcgtatcgtatcgtatcggctcaaagatcatcatcatcatccgattttagggtcttgaacgaaggctactctactagctaccagctaccagctactactgactggtaactaagacgtacatcctttcggtcgaccttatcatcgacgattgaacaccacctcgatcagctcggttacatttctaagcttccgtcatcgacagtctatcaggttgacgtcgatcgcgtatctggcgcaaagcacaagagttcccggtacagtcgttcacgataaaattctatcgtcgccgacgtcacaatgagcgctcccggccgagagccacctacccgttcagggtctggttcatcacaatctcaaggtcagggatccatgcagaacacgcaaccatcacaggcgatgtggaacaacctatcgatgatgtccagtttcccctcggcacaacccgtcaacgggtatgaccggtacccccagatccaggtgcctcaaatgcaacctacatccagctcctttggtaacggcaacggcttgcccatgagcatgtttccccattctatacaaggccgggacgggtatgacgaaggacctcgaagggactctcatcaagccgtggagatggccgcctctgccctggcgaatctaggtaacggaagctccgccaatccacctcctgcaagcacctcgaggcacatcgctactgaagccgggcctagtcaggcaaccagcaaaccgatcgaggatacaggtggaccggattcggcctctggttccgggtctgcgaacaagaagaagaggaaacccaagcaaggggagaatttggacgaggatgggagacgaaagacggctcgggcgtgcgatcagtgtgtgagtgcggatcggtatcgaaacccggttcatccgacgtgtagctgatgacgccggggacaaggacagcggacgaaaaagattaggtgtgagatcatcgtcgcaccggattcggaagatgcgcatcctagaggaatgtgcaagcattgtcaaaataccaacaacgagtgtaccttgtaagccgcaagggatctacatcgaaaactagaatggtagctaacccgagtcatcgcctcagctatatgcctatagcagagactaggttcaagaaacgaaaaggtgagctgggacaagcgagctggataaaaggcgcctgatctgaccagttcgagggatatagtagcagaagagagccacacatcatcaccgcagaacaaccaatcgcccgaaccgaatttgccagccgtcgttgacagctacccaaccaaagaccgcaggacgagccaggcagacgcgcagcaatatggtgctcagtacaccctctcgcccaacgagatagggcccccatcgaacagtagcgatcgcatcgagatcggcgatcaccaagttttggtacccaaggcaggtatggcgggacgggcgttgggacatgggggaagggtcgagggtaagtcgcgagccctgacttgtcagcaggaacactgtctcaccctggttcgctgaagacgatgttcgttatacaggtcctacttctctctcttatatccttcactcgaccgcttccctgccacggcattcggtagaggaatatgacatgcggaatcatcagacgtggcaatttacgacggacgacggcgatggcatcattcgggtgtgtaatccgcctacatcatcatccttcaagcagggaagcgggtatacagaatcgtcaccgtcagaaggcccgaaccaaccacaaaaacccgtcctcaccgctgcactcatctcgaccctggtgaattcttacttcacccacatcgcgcccctctttccgatcgtatgcaagaaggactttgtcaagggtggaaatcctccaccgttactgctctacgcaatggctggagccgcgagtacgcggagaggtgtcaagaaggaggtcttcaacgccataagagccgtgatcaacgggctcatccgaaacaacgacgtcttgagtgatccctcgcttaccaatgtgcaggcattagtacgttccggatgacaggacatatccctacatacttcatctcacgctaatgttgccgccatcttcacagctgatccttaacatggcagcggatatccacgctcaaccaagctcgactgctgtcggggcttccgtgacccgaatatcggcggcgattaggatggcgcagaatctaggtcttcatcgggaaagcgtggctacgtcagacgacccagatgaaatgtccaagatcgagctcaaacgacgagtctgggccgtttgcgtgatcttcgatcgatggtaagtctaggcaactcagacctacgtggccaccacgcgctgactgcgagtctggacgatagggtcgctgcctgtctcgggttaccgatgctgatcgacatcacagattgcgattgtttattgccctcaccatacgaaatcacgtcaaatccggacggaacgaccgcttggcacatcacagagcatcagccatatgcgatcttgaccgagcatctcaaactatccatcttattgggtcgtgttttgaaatgcgtatacaggtaagcgccactcctccaggcgactgaccgcactatccggtctgacatctcctttttccgaccgacagtccggtcggcttgacccaaaccacaaacgagcaactcagcagtcttatcaacgatatgaacgagtggcagctacaattacccgccgagctgcgtcacaccaacagggacagcgacatgggctgcgggctgctacatctcggacacgtggcgatgcaattcctcttttggagaactttcatgcgtctaaactattctctgccggcacacgtcaagcttagcatggacgtagccacttggagcaaacttgtcaagtggtcgaccgatgcgatcaattggttgcgcaaccacgaagaagccatagataccgtcttgtaagcaagcgcgcccgactcagtcggtgaataactgactgattgccgctttccgaataaacagtatctatgcatatgccatcaacaatgcagctttgatacaggcgagttctgtatctcgatgcgtcatcccgcattttgagctgacttgttccccttgacatatacagtaccacacttgggtcagaagatgcacacccgaggcgctagagatgctcaagattcttcgcgacgtcgtgcagcggtgggaggacgcggtgcagcctggtcagtaacagcatgcgcctgacaaacccgaataacactgacaagcttgatcacgcagaccatatgagtattcggcgcaaggtaggcttgtgaacactagcatctggtcgaacttgactgatcattgcgtgcgttgtctttaaccagaccattgaaatcatgacattgctgtacgaggccgcgaaaaaggttcacacgcccaacggtggactcggcactgctgctctcaacccgacaccgggtctcaagcgtagagatcccgagcttttcaagcgcatcgtctggaaaccagacccagacgaccctggaaagggtgtcttcgtagcgaccgacatgggatccacttcgaggcaattagaacgagaattaccccccggtattcttgtcactgagtccgctgtaccacctaatcaagaactagtccctcagttaggcggcaaccacaacatccagcaaaatctcggtcaacaacctcaaatgaatcagcactacaatatgctcaatggcaacaatgccgatcaattgcaacaagctccaaagatggcgcaaatggcgagccacggggctaatatctcaaccgagccggtatcgtatctggttagttagcttcaacatacgcgtcgatttcgcggcaatgactgactggaacctgaatgactgtaaaacagaaccttaacccaggattgcaatacttccctcagatgcgcaacgtatccgaaggcggagagacggacatgaacacactcttgagcatgctggatcacaacaacgccgaagcgctcacacaggcgcagcttttagacaataacctgctcaacggcctccctccgactttcgacttcgacgcttggtccgaatacttcggccgattcgactttgccaatctgccttttgatcagaataccaataacttcgcgcccaaccagaattacggatatgcggcgcgatgagaccagtccgcgtccgagtagaggaaagttgtaatcggtctcgcatccaaggctgtcacttagattctcacaagccagtcgtcatcattatatgtatcgctactttatattctaatgccaggcatcatcgcttctctgtgaagcgtgaaaataacggaagatcagcaatcgctctcattgctcgtaggcaaaacaaaggcaaactcactgccgagaactttggtcaagctgttacgaatcgtgttggccatcttctccgactctttcttggtgaacgccgccgagatcatgatcttgagactcggtgcaggctcaaagacttcctggccacgcaggcgcgcggctcgacagatgagaacaccttgaccgagcgcgtcgtcgactacatcttgcagcaaacgctcctcctgctcgatagactcagggggcgagagcatgtagatgtggatcaatgcggactggtggtccgagggaatgtaaatggtaacgccctcgagtttcgccagcccttgtcggaatgtacggatgttttctgccagttgactgaaaacttggggcgaagtttgcataatgttgatggcagcagatgctgtagtcgccaatagtcccggcatagcggctgaaaagacaaaagctgctccgttgatacgctggaatgatgtagagcatcagccgaagccttgaacagtctcgagcggagcgatcgacttgcctgatgatgggttacgtgctccataccggcgcagaatccgccacccgcgttcagtcctacagccatggatccgaccaagatgtccacttcggtggcctgtagtggcagcactgagtcaacatctactgtggcgatgagccttatctttcgatccaattgctcactggcaccccggagacttcggtcactcctcgtccatgtttgcccaccatgccaaacgaataggtctcgtccagcatgagacggaacttgtatttcttcttgagctcgacctatacagttcctgtcagtacatgcttcatttcgataccaggtgggaagtggtttgccttaccactttcgctaggtccagcatggctccgttattctcgaagatgccctccgtcacgatgaatcgtcgcttgagaggtccacctttcctccttgcttctttctcggcaatcttgagctgcctttccaggtcagccatatcgttgtgttcataccacttgacggtgcaccgagcgatttgaagccctttttgaatggcaaagttgacggatttgtccgcgacgacaacgtctccacgtttggcgaaggcagggattaccgaagtgattgttgagaacgattgcgaatagacgatcaccgagtcgataccgaggaattgagcaatatcggtttccaatcgagtgtggacatctgtagatgacacaggagattagattgtgtgaggctgtgttgaaccattcgcatgagtgttactcaccaagggtaccgtaaaatccaggcggtccacagggcgagagtccgtatcctctcaaagtagcgatcgcgacctctttaatcctctcatcttcgagcagtccaacccagttgggactcgcgatattgagaacggtcttgccggttgcagccagcttgggcttgtgggaggcgggcccagaaatcactggcagagagggtaggatagtgtgttcgaacttggtggtgggagcatcgaccaaaggcataggctgccaatcgtcgaccaactcatcgatctcctgcgtcatgcgacagatccggaatgcatcagtgagcctgaacggcaagctccggtccaaacggagacggctactgaccttttcgctcaactcgacccagttcctcgactgcccttcacctcgcgtacgacgactgaacagagtcctgagagcgaatacaacgaggaacagctcgagaagtgatcggtatgggtcattctggatgatgagcaagcgattagcggctgattgtcgattgatcgatacagcaagtcgagacttgcctggtatgagctcctgatgtatcggatcagaatgggagacccagggatagaattgaagccgttctgtaccttgactagagtcgaggtcagaacaccgatgagcggcagtaagggagaaggaagctcgggcgttgtgctgttcatggtggtagtttattttggttgttgttgtgtgaatcttgatcttcggtcaatagcaagttgtgtccgctaagacctgaagtctagccacaacgattcttatggcgggccttgacgacgacaagaagcgaagtgggatggttctaccggcctactggtagttcgaagcgagtgaacgtatcgcgaagttgcttggggtcgtcgatctgatctgaagagaacgagtccatgtagcttgtcgatctacccaaggccaggcgcgcggcggccgcgcatattcgctaggcgaatgatcgtaaaaagcccaagttacaggatcgaccgagcaccgacacaagtatctgaatcagagtcttatatctaatctctggatctctgggcagtccaagatcagataggaagtctcgcatgtatatgagggtatggaaatgagtgttacaaatcctagagattatcaaacagtcggaccaggcgatacccttagacgagtgctccccaactgatataacgcagacaacatcaataagagcataaaatttccaccttcgctcgatagacaacctaccagccgagcccagcaaagaatgccgcgagagaaatgaccagactctattgtttcgtgtgaattagaaacaataatgcttgcaatagtcaaatgtcgctcaccccccaagtcaccgccgataggccaactcgcctcacggccacagcccagatgcacgagatcacgtaatgggccaggaacactccagctaccaccagtgggaagagcttgtgaggcttaagctggtcaagcgggatcaggccatgtccatgcgaaggatccgagcgggccgaaagtcggtggtaaatcggcgctgtgttgtaatggaaagcagagacgatgagggtgaaacccaagttcaggactatcgtatccaaacgccacagtatgtgcacagcgacggcgatattctgtgctcgacaagctcagctaagttcgtagttcgtctcaagtgaaccaacttaccgggaacggtttgcccaaggcatcctccaagtctgtatccaggattcgctcttgctgatcagctatcgggctcgacgccatagtcgaaagatcttacctttccttcctcgtagcctctgcaaagcttcaatttttgccagaaggttgtcctcttcgtcctcgagactggacactgaagactgatcgtctggggccaagacatccgagtccagttgctgagacgtggcggtagcgtaatcacgggcggtcgaggtcgacatgttcctctccgaatcacccgatgccgtgaccgatggctgatctagcagatcactccagaggcgaacaccgctgaaccatcctcttgtgatgccccagaaggcttctgcgacgccccatccgatccccaggtaataagattgttgaaacagttgagtggtggtaaccatggccgatgagtggggctcgcacaggtacaacgagaccacgcgaagcaattcctgaaatccggtgtggaaaaagatccccctagttgaaggcaaaggtatcaactagggtagccagtgattccatcaagtgatgtcacttacagagcggccagcagaagaagccacgcagtgctcctcgacctgtttgtgcgtcggccttggcgagaacagatctttccaagctgcccggggaatagattgacagcctccaggactggttgtctcaacgcttgcatgctgacgctggcaaggatgccgatcactaagggaggccataagaaaggatgaggatattcaggcctctcagtcggaggtagccggcgctcgtcgctggtcggtggcctagcccataccacagtgtcagctacaagcctgtattactagcctacaaacacactcaccatgcatatgtagccaacaggatcaaagcccagctgcccaggagagtgaatacgggtactagcagatacatgagcttcaggtatgtataactagctacaagttcgctgaaaatcagatcgtgttcagacatgccctatagattgtctttgtactcaccttgtgttagctggtgacgtctacgagcatgctcgatagaggaggccctgtcagagtatgatcgcacactgcggatactgcctcgaccgtccaggccccttccttcaaccgactgccatacctcgacgtcgttcccatcgagtcgagcctcatctccggcataatctctagtctgaacccccgctgctgatcttgatcccgaagtggaaccgtaatcgagtcgggattcatcacgatctccatcttgcaaagaactcgtttttgatgacctcaacaggcgttcatcttctgcgttggcgtggtgctgctgtttcttgtcacgacgcagagtcgaagtgatggccgagaccatgccattgctggtcatgttggtacagcgtattactgtcttggcacttcgatgcggagcttgatgatattgacagggaaatttatggaagggatcataggtttgaaagaaatcaacgagcgagatgtagcgacaactgattgctgagcgtatcgctcacacacaagaggctttcccgcgtcatacgcgaccaacgatattcgtcatgatgtcgagagacaaggaaatgaggcaagagctatgcttcacacatcgagctcgtctggtctttggtccatttgcaattgtggtggtgtgggtctacatattcgagtcgcatgaggacaataatgcttatacaagagaaggaagcgattacctccctcagaacttgaacttctccttctcacgtctgtcccggtcaccaccaccccgaccacgttcgcttgtccgggatttcttcgcctgggcgatcacatcatcaaactctcgcctatctacgtccgcacccggtacgtggactcggctagactgtgatttactggcgtcgtatctggctctgagctcttcttgagatagaccctccaagtcatccggatcgacagcaatctcgactccagccttgcgctgcgtcggaagacaagggaccatacagttaggtccgaacgctcgcacgagactgtcgactacagtacgaacctttgtgccccgatcgtcttggcccagcaccctaggaccactggatggaccacctccaagactgccgacatcgtacgtcgtcgagctgcccatgaagcccctcgagcttgtctgcctttcggggatgacctgataaagctctcttggtacgggggtcgccgacacctcgctctcggctggcccagcgtctttcctgagttgcaagaagtcgggcgtctccagtccaccaggaacggtcgagatcgccgtctgcatgccggacggagtctccataccggagggagttcgcaggccttcatcgggagcgtggccggactcgagaaggtcctcctcgtcctcctcttcatcctcagattcctcctcctcggattctgtgatttgaaggaatgatgtgataaggcattgctttcaagatcagaatggcgcgtatcagcgtaccttcggcttcgggctcgagctggccccacaactccttctctacgtcatcgcccgactgtcaaattggcaagcatcttcagcttggcagttatcactggatccgaccggaaggggaactactgacctgtccgtcctgatctcctagtacaccgaaaggatcgccgtacaacgggcggttgaactcgtcaaccataggtcgaccccagccaccgggatggaaaccccattgagctctgtatatagtacaagtcgcacggagaggccaaggtcagtgtggagcgctttgcgtaatccgagagacgtacccggcagggatgggtgcattcaaacctgggattctcaaattcgggtagcttggagggggtccatatcgctgcatagcgattagccaggggggtggcgccaagggcggaatcgagagcgcctccttgaggtcttccgacagttcacccggtttcttcatcctcagatccgtctcgagctctttcccttcgtaatacctgatggacgacgaggatcagccacaaatcgcaaaagatgaggctggacatttgacaactcacgcttccccgaatttggacatggatggcttggtttggtacctgaaaaaggcgtcatgtagcttttggtagtcgatatcgatcttgcccattttgggttggacccgctctctcgtcttttgcttcagcgtcatcgttgcctccttctccttgatcgcgtctcgctggtcggcaattccggtgtcggcgatccacgctgtgaggttgatttcataagcagagaaccgcacacactgtgaatgcaattactaacgcggtagttggaaaggcgccttctcgattccccttttacccgacagatactctcgcttggcagaccaatgtacaggaaccggtaccgtgctagtgactcaagtatatatcagcctacgatctagtgtcgttccgctttgacttgactcacttccggtaagctttcaggctgacaagcaatctgggatcccgggcatcgcagtcgacccattcaacaacctcgggcttgctgaccagctgcttcagttcggcaaccgacaatttctaccaacagaaataaacatcatgtcaatctctggcagcagacacccaggtcaagtagactgaatcgcacagcgagtacttacagcaagctgacgcttcttcttcttgctcaatcgctgctggttggctagtgctcgttcgcggtcttcgtcatcgtcgtcctcttcgtccgaatagatcacttctgccttggctggtccgctgtcgacctgatctcccatgacaagtccatcgcaagctaggtcagtgactggcgagactggggtaatcacatggcgagagacgactcacggcttcatcggacatgatctggtcggcgccgtcgccttggaacttttcaaagactgacgagaacatcgccatggctgggtcgttggggtcgaacaacatggcttgagaagatatggagtctgaagaggaggcgggcatctgcacgagacgatcaaaggtgacggtgaacccgaggtcgacacaattggcatacagctcgatcaggtacttacggctacatcatcctcttctttgatctgctcttcggtatcagcattttcagcagagataccgttcgtcttgtcgatgccctgatccgcaatcttcttggcctttgccttcattctcctcagctggttcttggacttggcccctcctccaagtttgggggacgccgaaggcatggcgccgtcgccatcttgcgcggcggtaggaatcaacgagcctgccatgacttgcaaggattagatatatgtacttgtatggcctgtaatccgggttctatacaacgagctgaggtctgtgtatgtctttctatgctgaacgacatgagatcgaagctcttgatcccagcttcccacgacgaggtcgagagccgggacccgtccaggcgaggctgggcgacgcgcaaatacagggatgagggggaatcgcctaaccgtgctaaatgtggaggttgacctggtgatcgaggacatgaatcatccttacaccattctagctatagcgctatgtgcgatatccatccaccatattctacaatccgtatcaagaccatctcgctcaggttggttcatagcttagagaagattcctcctacctgctaggtgatctgctgcttcttctgcccaacatggtctcgcaagagacgagagcgagaagccaacaaagtcaacaatcaaacgaggaagaggctccagctgctacaccgagtatcagggacatcggcaagtcccacttacatcgtccggaaggttgcttaaccgtttaacatcgaactttgaaacttccataatatagatgaaagcaggtgagctacccgacttagctggaccaccttcggtttccgcggccaagcatccgatacttatcctcactttcgatcttgtagctgctttcggatcttgatcgcaaccgacaatcatgtaggatataacgagagagatccggtacgaggacaggattcgatgaatacttttcgagagattctggaaatcgcgaaagaacgaaaggttaatgaccggagcccaagccattatgtattcgagtgtccaaggattgagcattaaccctccctattcttgctcgtaggtagactttgtgttactcgctggggatctattccacgagaacagaccctctcgagcgtgcctgcatcaaatgattgccctgctgcgggaatacagcttgggtgaccgaccagtcgaggtaagaccgttggcttttcgctgtgggcgagcgagtctcattccgtgaggttcttttctggttttagatggagctgttgagcgatcccatggagggtaatacgcctggattcaggtgagcgcaaggtcaggccataactcccgctgtttcgcgctcagtcagacttggcgtagcttccctgcgatcaattatgaagacccaaatctcaacgttgcgatcccagtcttctcgattcacggtaaccacgacgatccccaaggaacaggtcccgtacgttgcgaatcgtctgtcagagtaggccttgttttcgaggttgattgatattcaacacaggaaggagctctttgcgcgctagacatcctcgccgctgccggtgtcatcaactattttggcaaagtccacttggcggcgaacgaagaagacccgaacgatccaaactcttccggtatcaagattcgacccgtcttgttacaaaagggagatactaggctggccatgtatggcgttgggaatgtcaaggacaccaggatgcattacgaactccggagcaatcgggtgagaatgttcatgccgcaggaggaccaaaaggcggcctggttcaacctgctactggtgcatcaaaatcggtaagtcaagttgacccgcgagagatacgttccgaatcggacgactttgactgacgtagccacacgtcggaagagtgaagcacggccctcaaaactctgtcccggaaggcatgttcgatgattcgatcgatctggtgctctggggccacgaacatgactgcaggatcgaaccggaaaaggttcccaacaagaggtattacatctcgcaacctggaagctccgttgccaccagtcttgctcatggcgaggcgatcccaaagtaagcctcgcttgatctgaactgtggcggaatgatacgtccccgattgctgactttgcggccgatctttacttcgggtaggaaagtagggatcctctcgattcaagaaggacagttcaacatcgagcctattcctttgaagacggttcggccgttcaagattggcgatatcaatctcgaggaggaggcggacaacgaagaaaatggcatcgatatgcagaaacgagaaacaattacagcgttcttgaagaccaaagtgagcatcggacagagtatcagtagtcatgaaacagctaagcggaagctccctcgcagattgaagagttgatcatcgaagcggaagacgagtggaaagagctgcatcccaacgccaaagacaaaatgatgttgccgttgatccgtttgcgagtgagttgcgcgattgttgacgactccgaatgccgagctaattcgtctcgtcttgccaggtcgagacaactggagccaaggagctgacgaacggacctcgaataggttccgagttcaaagagcgcgttgccaacccgaaagacgtcatccaatatcacaagagaaaggcgtttgtcagcaaaagtgagcttgaggttgacggtaggccagatcctacggagtcggactgagcaatgatcctttcgacccacagaggaccgggtgaccgcggatcagcccgactttgacgaaatggacgaggagggtttgctgtcaagtagtggaaccggcgatggaccatccaagatacggatgggggaattggtgaaaaagtatctgcaagctcaaacgctggaagtgttgagagaggacgagctcgaggacgccgtgactcgatacgttgacaaggatgataccgacgccatcaaagagtgcgtgagaggaatggaacgggtcaggtatgtcattgacaggtactttctacgcagctttctcaaggaaacactcgagggtatgaccggtggattgaagaagaacgagtcgaacgtagactacgatgatgcttctaccttcaagaaggtggtcagtagcgagtgtgatccatttgctgaagatatgagaactgatgggatcctcgtgaacagatccaagaccagaaggaaaagcaagccacacagccgagaggggaaaagaaccgaggtggtcgacaggtatctataggatctttgggctgccggtagtgagagaacgtttctgacatcgcgaggactcgccgcagaccaatcgacagcgcagagctcagagtgacgatagcatgcgtaagtagggtcaacgcctctgcgtcccgttgacgaaacataacctgacggagtaatcttgttaccagtggaagatgacgatttcatggacgtgttccggagagatgatgatcgggactccgacgatatttccttgccggcgaatcgggcgaccaaagcggcagcaactaaaaaggcagctgctaagaaggctccagccaagcgagttgcgaaaaaggcggtccccttggtcagtccaggcgtgtccttggatgttgcaagctttacgattgattgatcgcttttgacccgttcggtatagtttgacgacgaagacgacgacgatgacgaggaacaggaagaagaagaggccgtagattctgacgaggcagacttccgacctcgacctagtgctgccgctaccaagaagaaggctactgcgagtcgagctaccgcagggactggtatgaggggtaggaggggggcgaaagcctcaacaccagctgccagacagagtcagcttaggtgagtgtgtgaccgggaaatgcaagacctctttccacctgtcacaacctgaacttcgattggattcccagtttcggagcaagcgggagtcgacctgcgaggcgcgctgccacgcgggatgttggagctgtaaatatacggcgagaagctcgatgttgggatctttcgctgctcgctgaccccgtgcctttcctgcccctgaccggtactatagatcgagatttcagatgacgaagacgattgattcggagaacggctcgacgctcttgtccgatctgtaacgaatactgcgctgtagcttagtgacccctgttttatgcttcccatcgactgtacttagggaattctacggaatacgcttgggaatggttatactatatgctagaagattcaggatgcttgatggtagatgggcatcgcttgaggcgcacggtgtaccgcgaggtactgtatcaactggtgcaaacgacgttatgtgcgacgaagccgcacgggatccacattgttctctctgttcgaaagatatccagacaggacgtcacctgatctcttctcttggaccgcctttcgggctgaccttctttacatagatcagtgcgggctacattgacggcggcagatcatcaatcagattctattacggatgttggcgcgaggtttagctgtcttttcgacgcctttgtcatgaattgcagagcgtcccgtacaagcactgcctcgccctcgagtgggtctgtacatatgcctgcagcactcaaagacaaaagatctcgctcattatgctaggcaatgtaagcgaagcagatctccagacaacctgcaaccaggcgcaagggttgccaaatctgtccgctcacgatgcccggaagcggcccgatctcgaaacaaaaaggatcggattgagattgcagccgggcgacacacacctcgggcagggccggaagcaggcagaaacgctaaaaatcgattttgtgcggtagcaactaagcgagagacgcgtgatgaggctgcaggacgggcagagatgctaaaaaatcagcacagtttagggcagggaggggctaggaggggagaggacggcgcgtggtccgtgttcgtgtatgcttacttgccctgtcgccccttggcctcctcgtgccctgccctgtcgccgtatcgctcgcatcgccgttgttcgccctgagcctcgcgctgttcgccagcagcaacctcgcccggtagcaacctctgatcctgacagcagcgagcaggtagcaaagtggtgatagagttggaccatattgactttcaactcgagaaaacacctcgattttactcctgtcactacagatttcttgcctcgcacacatccccatatcttggtacgtccgcatccagtagtgtcttggtcgcttcctaacagtgcactgcttaccaacgatctctgcctcttctcttcgcgactcatccgctcgacccgcgattcgcaactcgaattcttcacgatctaccggtcaaacagaacagcgaccgtcccaaaacgcatctctacttctccctccacacgttcttttaaaacacatacatacacaacaaaatgaaggtgagctagctttaccctcagtccctaaaacgaccagttcagcgagctaacaaccgaccgacctacctgatcatgacaggctttgattctcgtcggtggtcagtccgctttcggatcaacgtatcctgtccagcatgaagtctgacagcctacctttgcatgtacaggattcggaacccgtcttaggcccttgaccttgacccttcccaagcctttggtcgagttctgcaacaaggtgagtcgaaagtcgagcttgaaaagacacgttcgtttcgtctcgtacgcgagcgtgtcttttcaggtagtccggttcgtgcaagatgctcctgaggctcatgaatgtgtctgtgtgtattatcggtactataggccatgatgtgagtcctacgataagctggtctagacgacctccccccgtgaacacgtggctgaccgtgccgactttcgctaatgtctaatcagcttgcaccagatcgacgtgagttgtcgatcgatttcgatatcaacgtgatacccacatgctgatatgcccattctcatgctcaggccctcgtcaaggccggtgtcaaggacattgtcctcgctgtcaactaccgacccgaagtcatggtcgccatgctcaaacagaccgaggaagagtacggtatcaccatcaccttctccgtcgagaccgagcctctcggcaccgccggtcctctcgccctcgcccgtgaaatcttgggcaaggacgactctcccttcttcgtcctcaactcggacgtcacctgcacctaccccttcgaggccttccgagacttccacgctagccacggctgcgaaggttcgatcatggtcaccaaggtcgccgagccctcggcgtacggtgtcgtcgtcaccaagcccggctcgacggtgatcgaccgattcgtcgaaaagcctgtcgagtttgtcggaaacaggatcaacgccggtatctacatcttcaaccccagcgtcttggacaggatcgaggtgggtgacgccagtgttcgaattcggacagccacgatatcgttctgatgttgacctcactctcactcggcacacagctccgaccgacctcgatcgaaaaggagatcttccccgccgtcgctgctgaccaccagctccactcgtttgacctgcaaggtttctggatggacgtcggtcaacccaaggactacctctcgggtgagtctcgccgtgaagggaaattggaatcgatcttggtaggctgacgaggacgatcggtcttgtttgcgtggaaaaggaacctgcctctatctctcacacctgactgctacgcactctcctctgcttaccgaccccaagcagaacaagtgggtgcacggtggtaacgtcttggctgaccccgtaagtcgatctaggattcgcttgggaaagaccgctcgggactgaccggcactgtcgagtgcccgcagactgccgagatcgaccccaccgccctgatcggacccaacgtcgtcatcggacccggagccaagattggacctggtgtcaggcttcagcgatgtgtcatcatggccaacgctaccgtccgggaccacgcctggatccagtcctcgatcatcggttggaactcgaccgtcggtcgatggacccgagtggagaacatcaccgtcctcggagacgacgtttccatcaaggatgagctttacgtaaacggtgcttcggtcttgccccacaagagcgtgagtcgaggacccgcgtggatgccgcgtaatgagactggaatttggactgatgcgattgcaatggaatagatttcgaccagcattaccgagcccaggattgtcatgtgtaagtctttgccagcggatgccctgatctgcaggagtatatcgcttacgctagtcgggttcctctgttgcagaatgacgctcctagcttgttgtatacgactcttaccctttagatggattgatcatgattcccctgcttgacgttcgggcttgctgtctcgaatggatcgttggttcacgggtgtgatattcaatgagccctcgcactcagctcgatgagcgagaggacctcgatgttcgatcacgtcttcgccaaggacagtctgctgattgatgatttgagagacggtcctcatgtctgacaaacgcgtcaaggcaagacaagatattggcttcaatgcaataatgggtggagatgtaaatggataatgacagcttggtggcctcccatggttgatagtcgcgaccccgtggtccggttctggcagactgaacctacactgtgatctcgacgaaactcttgccagcttcgtacagctagcagacgtcttattactaattagagcagcagagacagaagcaccttggttgggccggaaaggtggaaggaaatgaccatcatgggtccacagcaacgtgagagttgcgtgccgacggagtggctcggaaaagcattggatctagatgtggagaggagtcgattctcagaatagaaggttccagtgacttgcaagggaagggggtgttttgccgagatgcatggcctcacaatctaaataaccatcttgtaagggaaggagggctgatggcgccgcctgattgccgcagcctcaactttgtcttgtcatgttataaattcggtatgctctgtgcattcgaactaccctaagcaccgatcgatctgagggtctctccttttgcatcatcgtgcgctaagtaccagcgaattgcccacctagaatccgtgccattgagataccagtaagttactcgctgcagcatcaaagatatcggccaattctgacattccagcccgcgagcttcggcttgcttccagcatcacctaatgcggatatatacacaacccttcatcctcagtttcggtgccttctccactacctttcgtcccttcgtgagtctagttgaagaaaaggggagtcgcaaagggttatgggagctgcacagtcttgtggtcgagaaggtcgtcactgtcactatccatcatcgagcaccgtttacatcctctcaggatcgcaagatcaactctaaaatccaacacacggagcgaactcccgccccttcgttcgtcctctccagacgaccgtggcttggaaaccttttcgtcgatttatagggcaacacgcaacacgaggcgtacgtctgacaggcccaactttaaacgcctctctacatggacaagcgcggaccttccggaaatttggatccgcactttacgcttccccccgcatgatcgaagttcagagatttcaagattccattcagatgagcgaggtctctgtgcctgcacttcgggggtcaaggcgaaacagtttttgttgcgatcattcaacatctcagctctcgtcgctcatagtaatgacagaatcgatcaacttagattctggggttgtctcgtcggctgcggcagatgcgagcccagccgttccggcaccggttcataggcagccggctccccgtcccgccgtagataaagaacagctgctagagacgagggtttccgtcatccgtgaaggggacagtgtgatgctcaagctacctagtgatgtcatcagagtcgtgacggtacagaaagaagggtgagttcagcacgtccatctagacgcgacatgttttccgggaactcaggttcgcatgtgatacagagtaatttctatcggcaagttcggctccttcaacacttccgaattgattgggaagcacttcgacgtgacctatgaggtcgtaatgcccaccagcgctggaagtgaggtgccatcgcgaagcggcacgcctgcgaacgattcttctgccatggatatcgatagcgaggaggctagtgctgccgagcggcctcctgctgtggtcgagagcaatcggggcaaacgaggaggcaagaaggggaaggaaaaggaacctgcgatcgatgtgagcgaggtcaggttgatgcctctgcgtccccctaggatggaagagctgggtgagcctgcgtcaactacctgcacattctgctacgtcatattgatcgcaaaatgactccccgtacagaggagaccggtgctacgaatgaacttattgatgacaacccggacctcgtcacttcgacacaatccgcattgctcagctctgaagaaattgcagagctgagaaaccagggtttcacggccgaggatatcatccagatgcaaatcgagaggcacgatcgattcgggttgaagacggagtttagcaaagacaagtggaagaagaggaaggagaagaagtaggtctcgcgttcctcatcatgatgctgaacccattggtctgaccgacaaattccaccaggtacacccaggccgtaaccccgctctcaccgactgtgaacaacatgattgactaccatctcgctcgagcttccgccaacatcctgaacattcgccgggacagcatctctcagcttcttaaccttgcttctatccgtcctggtggccgatacctcgtagtagacgacacgtccggcctagtaatcgccgcgatcctggaaagaatgggcggacaaggccgaatcatggtcttgagcgagaacgagtcgcctcccgcttggcccatcctggaatccatgaattttggaaaagacatcgtagagaaatgtgtcagtgtgctgaactgggcccaggctgaagaggactatgtccccgtcgagatggtacagcccgaaagggaagacgttgtcgatggacaggacgatgcgaagaccttgaaggccaggcagaaggaacaggccaagcagagaaagcgcgatgctgttgttggagagcttaacgacttgcgcgatgaattgcatcgaggcaattgggacgggtaagtcagatatcgcataggtgaaaactgaatctcgctgacagagcatgttctgcttgatagcctcgtatcggcttccgtgttctctccaggttccattatagagcggttgtcaccttacttggccgggtcctctagtatcgtcctttactcgccttaccagcacgtactcgctcaaacgctgaaaacgatgaaggacaagcccgagttcttggcccccaacttgaccgaaagttggatgaggaagtaccaggtctttcccggccgtactcatccggaaatgcagacgagtggtaccggtggatacctcttgcatgtgacatgggtgtaagtcgactctgctcgtgacaggctgcttgacgagataatccgctcatattcgtctggattgcccggtagctaccccaatcacgaagccggttggctgaccgcgtcctcggtgcgcaagcgcaacaggcaaaacgagcgagaaaagaacaagaaagccaaactggccgagggggaacaggaggatcctgcagatgctgagagcgttgttcaggaggtagtacagccggcaacaagtagcttgatgacgggctatgtgcgagtccctcaggtatgcgaactcaaccgtcgtgaagattgacctgcgattgatcgtgattgtcatccgtttcaaccagaaacgatactaccgtcagcgagcacatgccaacgtctttaccgatcacaacttgcaatagtacgtccggttattgacagtccaagtacggtgcgcaactgaacatgctcgattggtatagtccctcgtcacctcatacaatggactggtcaccgcactatccggattactgcacggcgccagctattgctgtagatggcaacccgactgaagcatcatcctcaacagctggccaaaagaaggtcgaatttgcggatgtcggttgcggatttggtggtctcttgatctcgctcgcgcctcaatttcccgacaccttgatgctcggtgagtttgcggataaatgcctcattttgtttgacaggctcctgatttcatttctccatctcgatcgcaggtatggaaattcgagtctcagtaacgcaatatgtgcatgatcgaatcatagcactccgtcaaatccaggacatgtttcccgagtcgaccgatggcgctgctgacgtctcgccggtaaataaccatcctgacgtgctcgctcatcagcacgcggtcaaggtacgggaaaagcttgctcgtaaaacagcaaaagccaaggccgctgcaaaggaatcggccgaggctgtcgagccaaagctcgagccaaacgagcctgtcactgctgaagaaggtgtcgagacggtacccgtcgtcgaggacgccgaagaggaaacagaacgattggccgaggaacgggagaatgaaagggctctcaagggcaaactcgatggcggtttcaagaacgtcagcgtcattcgagcgaacgctatgaagcacttgcccaatttctttgagaagggacaggtaagccgtgtatagtacccggagatctatatgaataccgaggctgatagtcatgctcgggtctgccagttgagcaagatattcttcttgttccctgacccgcacttcaagcgaagcaagcacaaggcaaggatcgtgacgtgagtcgtcttggcaaagaaggctagtcggcacggaaccaccggctcaatttgtgggcttgattgacaggacgacgctgctggccgagtatgcctacgttcttaagccgggcggcatctgctacaccgttaccgacgtcaagggtaagtcctagagctgtcaagtccgttaccgatcgattgctcaatatccattcctatcagacttgcacgattggatgatgcaccacctcaacctgcacccgttgttcgagtacatcccgactgaagagctcttggcggccaaagatcctgtactactggccgctatgaccagtacagaagagggaatgaaggtcgagaggaacaagggaagcaagtgggccgggtgctttaggaggatcgaggatccgtcggagaaacaggttggagaggacgatctgattgtcaagcccaaggtcgctcgcaaggtcgtcagacggagttgttgagccgggatagcatgttttatattatctctccagctagcgatgcggatgcgagtaacttcacttgatcactttgcgatttagattggtgacaacggggcgacacctagatcatagctgtctcggacgtaaaccgcttccggagtcggcgcgtgtcgcgtgtttacgtttctaggggacctagaatttagcgcgaggacggggaaagccgcgggtgcagtggaacgtggataagaacgatcaatacgtccatcaacggggtgagagagggagagagggatctatcgccccctctagctcgtcaagatctcgattgagcggagagcggttgagcttgtaaacggcgagacgactagcaagtggtggtacaatgttcacttctctcttactcctcactctccgttcgaatgtctaaaagagagaaaacaggccgagcactcgttatttgtctgtatattttagagtagagtaaagaggcatcgcgccagcgtgccgtttctgcttctcgcgtcgcttctgcccctgcctgcccgtgcctctggaaccgaagctcactgaccgacacgctgcccgtgttgtctcgctgccctcccgctacccttggccctgatggtccagctcagctcactcgctcactctctgcttcgacgatctcgattcacgctcgacaaccttggctaggaaagattcgatatcgatgctttcatgaccttctgaacctgctcgagctcgtccgcgctcgctcgtccaccaaactatcatccccagcgtccagccgtccgcccagctgatccatgcgagcgaggggtgcttatccagccacgacacctatctcggattcatacccaaaatcaatctcggtcgaaacgcacaagaccgacaagaatcctaatagtcccaacaactctccgaccattcgatctggtggtagtcctcccatcatagcttcccctttgaccagcagcagcgcactcgaacagcacgaacagaggctagctcatcgaaaaggtcaacccacctcgttttcggtcagctcgagctcggcgtattcgggaagaacaggagtctttgcggctaggacacaggaagcctccgtccagggaagcacaggttcttacgacacagacgactttattaacgttcctacgggcatgatgctggtgagtctgtcatgagaacccgcctccgggacgctcgatggtgggactatttcgagacgcggggttatacctcgctaggggattctcgtcgaatagtcgagctgatctgttcacgttcctattatcctccgttatgcgtccccgccttaaacgacactatcaatatcactgtacaacaacgttcgacctctgtcactctcgtaatcgtccacactgtctcggccttctcatcatcggtacccctgtcgcgcgaaatccatcagagagaaagagaacacaagcacaaagacgagacaagcggatcaagtatcagtggatcgagacggcccagtatgcagccaggaaatggattcatgggaaccggtgagtctgccgtggggtcacaagtggacagcgaaagctgggacgatgaggagatgatggatgcgcaagatcaggatcgcggatgatgcggatgtcgatcagaccgaggaggattacatcttcctgggatcgaggagaaacgcggggatagggggaatcaaggcatcaataatccagatatccggagctgatcatgccactccttgatcattcacatagggctttcgccgaagaaggtcggcatcattgccatggtcgtgttaggtttgctaacagtgggacgatggatggtccgtgagtcctggctacgttgtcgagccaaaaactcttcgaccactgctgatacgtcgggaacatttcgatcgatccagccgtgaccgtcgatatcgttcaccacgaccaccccttgaccccccgagattacttgaacgcatcacagtccgatccggcaccattcgatttctgcccgatctttggaccaggggatatcgtggccgagcggagaggacagtggggactcttgaagagtcgacttcatcagggaagcaatgcaaggattcagagggtcgtgcagaaggctctgagcggaatgccagtgacgattagtgtactcggtggttcaggtcagtattcaaggtcggatgcggtgcctgtcattgccgaaatcctgactcgactttgcgtctcgtcatgtagtatctgcgtgccacggtgccggcgacgaccccatccaccctaaatgttacccatcaaagttctttgaatggtggaacagcgtctttccccaccccgcttccgagttgacgaacggagcgacgaggaaatcagactcggcctactttgcttattgttcgggacaccacttgcccgacaagaccgatctcgtcattctcgaattcgatagcagcgatccaaagtaagcactgcggtttcggcaaatcagccacgacattccgtcctgaagcttattcctgatccgcctctatcgtagtgatccccaatggcttcagcactttgagctgttggtccgatcgatccttgttcgacccgacatgcctgctatcattatcctcgggcacttcagtcctcagatccaggctcagagtggtttcgccggacctgaactgctgcatactgcggtagcccatttctacgatgtgcctcacatcaggtcagtattgggactggttcaatgctgtacggacggaaagacaagctgacaatgcctcgattcaacctcatacagcaccaagggtttactctaccacgactacctgtccaaccccgaggctgcgcgatcaacgttctataccgatcccgtcttggccaatcctgcgggtcacgatttgttggccgatgtgctcatcagctatatgatgcagcaggtttgcgacggatggtccgcaacgatgggtcacgcctttgatgtgccctacatgggatcagagggaactgacagcacgaacggtggacccaacctcttcggaggagtcggtcagaggaagggcctgtcgcccattcaaaaggagagcgatggtggtaacattggcgccaccgattcgaaatacgccgggctcaaggtcccttcggccagattggccgatcgaccttcggacattctgcagttcagggagattgagcctttctgtgtatcggcaaacgatttgatcaaccctctgcctccctcgttgttctacggttctggctggcacgaccaccacccgaccaagggcgacggccacgacgatatgcactactggtacgctgaacagcctacgagtcgactgcgagtgcccatccagttgggtgctggagacgtggccatctactacttgcaagcgccagaggatcaaccattgggatcggtgacgtgctgggtagacgagtaagtatgagctggtggaccggttcgtgcccagagaacatacgagtctgatcggagactcctgtgttctgcgccttttagcaacgtggcaggagccgtcgagttgtctggtgtcgccgacgtaccgagcgtcatgccgacgtgagtatttacgagcgggtacaaggcgcaatcgatcatgataggctgacgctattgccattcgggggcgatttgtagcttgaccatgattgatcgacatgtagcacgaggatcccactttgtagagtgccagctgtgagtcgctactcaccgaaagttcccgacgaggccgtccgtgactgaacaccttgctctcatgcgaatcaggttgggagtggaaggaaagccaagtgagtgacggatgttaaccgattcctcggggaatacaaaccgcccgactgacattgctcgcccttgtcgcaacagctccgcctttcaagattctcggtattttcacgacatagacggcccgcatctcatccgccccagacggcgagatggccatttcttctcttccacggccccccctcgtacttcttgttttctacaccttgttatctttactcttctttcgtgtgcatggaggggcaaaccaggcttttcatcccgatcggtctggtcgtcgagagcgcgacgagatcggggggatcgtccttggctgtttcgaggtagccgggacgacttgcgcatgattacgatacacaaacatttcgaaattacaagactgcgagggatgcgaccgtcgtgttttgatactcttcttgagcgtcggcgtgtgctgccctggagaagtgcgagtcgacacgaacttagattcggaaatgcttacggaggtggctgtccatgcttgagaggagcgatttagctcattaggctggcttaagtttcgtgtgcatgaaacgggcttctctgggcatgaaacctcaagacgaccgagtcgcaaaggtgattcggaaataaatgttagttggggaggtgcgcgggtctgatggctgtgacgtgacgtgggacgacgagaggattatcaccgacagaagcgcacacgcacgcctggacgcgtctcgagcttgaatagttgcgccaactggaagcgcgcggatgctcgcccgctcgttccttcccgcttgctgggcggctcaacccgggggtcgatgggatgtgagagcgtgtctgtctctctctgtgtgtctccctcctggttgagcgtcgctccccctctcccccctcttcccaggcctcgccctcctacagccagcccagtccagcccccggccgacattgcgatctccaccttgacgacctcgacactatcgaattcaaacgaaacctccaagcaccaagtaaaagctcttctttccgtgatcgtaccgccaaccaaaagaaggaccacctctaccttttcccgacaagaaagagtagtatagaacatcaagatggtgcgtagtctgtggataccggaggggatgcgtgtggtctgccagcagcagtccaaaaggagggcaggatacatcaagatcgttcgatggacaaggacgtgaaccggaatcgtcactggcatcaggatacgggatgggtcaggcgcgctcgctctgaacgacggaggacgggagtgtcggacgtgcaaacgggtggatgggatcgtattgtcgatctgcaggacgcgatggttctggcttgtggatgaggggaaccagagccgtccgatcagcagttccgacaaggcgtctcgacatccaacgtcacagtgacgactcgttcacctcagtcctcccccgaaccgtcgggatagacaaccatgcccatctcggatgtcacacgaaatcggtcacgttcttgtccgcgagcgccttcctgctctttggacctggtcgaccatgcgaaacctcgtcccaaacatgcgctgacaatcatcgacttcttgacaggctcgtggacctaagaagcacctcaagcgtttggcagctccctcttcgtggatgctcgacaagttgtcgggtacctacgtgagtctattgggttcttttaggaagaccgccgagcctgaactaaatctatccgatttgtttcgctttttccgcaggctccccgaccttcgcccggtcctcacaagctccgtgaatctctcccccttaccatcttcctccgaaaccgtctcaagtacgccttgaccggtcgtgaggttaccaccatcatggcccagaggaccatcaaggtcgatggcaaggtcaggaccgacgagacttaccccgccggtttcatggacgtcatctcgatcgagaggtctggcgagcacttccgtctcctctacgacgtcaagggtcgattcaccatccaccgaatcacccccgaggaggcttccttcaagctcttgaaggtcaaggctcaccagctcggacaaaagggtgttccttacctcatcacccacgacggacgaaccatccgttaccccgaccccgtcatcaaggccaacgacaccgtcaagttcgacttggtcaacaacaagattgtcgaccacgtcaagtttgacgtcggtaacgtcgtcatggtcaccggaggacgaaacatgggaaggtccggtgtcattgtgcacagggagaggcaccagggtggattcgacattgtccacgtcaaggacgttttggacaggacctttgccacccggtgagtgatccacgggccgggcgctggtcatccaggtagagacaggcagagacgacggcgtgctgaccctgatcatcgtttcgatcgactgtagtttgtccaacattttcgtcattggcgagggcaacaagcctcttgtctctttgcccaagggcaagggtgtcaagctttccattgctggtgcgtatcgactatgggttcttcgtcaaggtcggataataacaagttgactgatcctttcaccggtcgtctttgcagaggagcgtgaccagcgccgaaggcagcgagcttccgacgcttaagaaggcggaaacacgggtgttcggactagttttgacgagagcgaggtctttgtagtagcctttgtttacagagacttttgcatcctttccatcgtatccgatgtgttttcaaaatgaatcgaggcggatcgggccgtgcaatgcgccgtggacgtgttccttgcatttctcgcagcaagactggcaggttcctaccgatataatcacggtctctgtccccagatagcgttgcgatccaggtgataatcagttgtcagtcgatcgtccccgagatgacgattgaaatcgattcgacttgtacaattttgtgcggacgcaagtggcttttcgtgttgttcgggggtggattacgcgctgaattgattctcctgcgggctgccaaggatcttttgatttgatccggtcaatctggtcgaggtcaatctcgatggtgtcatctcattcacaatcgcaacatcatctacccaggctccaatcttaaccttgtagatctttagctatcccacaggaatctcccgggattcgttccactcaacatgtcgaaaccgaaccctaccgcatcgacatcgctcctcggagccgcgtcgggcaccaacagaccatccaattcgaacctgcccttgccgtactcgcagaccccgagcgttcctcctgctagaaaggagactagggggccctacaggtgagcatatgcgtgtggtctccacccggacgtagcaaaccgggagaacgtcgatggcagatgcgctgatcacgttcgttctcggtacgcatgtgcaggacttccaagaccgccaacaagctcaaagtgttgcctacttcgtcgaccaagggaccaggaaccgctcagcagcaaagtcaagatcagtcaaagtcggccgtcaggactgcagatgacgaagatgatgatgatgatgacgacgatgacgacgaggatgtcggtacgggtgacggagtgcacgtacgtcaatccttcaactagattccagacaatgtcccagactgacaattacaacgatgcgatagttctacgacgccctctcgcacatccctgcgggctcggctcgacgagatgctatgaggctgaccaagacggaaaaggccaagctgcccagggttaccgcctattgtactgccgcgtgagtggttgatgctagccatcagtcatcgcgagatagcattgctgacgacgactcggaacttttctagtggtttcaatctgccggccttgcagacctacttccagtcccgctcctccgcatatcgatgcaacccgcggctgttcgaagccgagtgcttgcacaccccttacctacctcccgcacccagctcgtcgcatctagattcttcgccggtgcttcgtccgaaacgcaccgaccggaacgatcgggaaacggtccccgagggtgacctcttgaatttgggcgtgagcgccactcagagtcaggatccgaacgaagtccccgtcggcgagggggaccatcatgccgagggtatcgacgagagcgagcagctcttgcagacaaagcagcatcatcaggacgaggaacgacgtcgtctgtcccactcgaataacccggacaacgcttacaatacctcggagagactcaagcgagaagcgcaggaactgaacgatcgcgaggttcatgagaggcgaagacaacacttggcaaaacgggtgacggggttcgcgacgaaaccgtcggcattgaatgctggaccacctaggaggaagaggaagaatagtcgcgcttccgagcacgatgcgagcgatcgagaggatgaggatggggacgaagaatgggtcccagatgtcttcatctttgaatacggaacggtcgtcatttggggaatgaccgagcgtgaggaaaagagggtgctggcaaatctgtatgtccagtcccaacggttttccaggtactgaaaagtatagctcaccgagcgttcgaccttccagccgtaaattcgaaattgaaaagctctcggtcgaggatatcgagatggaagacctgaatttctactacgcaaattattctcgaatctacaacgacgtcattaccctcaggaaaggcagttcttttatgtacgcatagctttaaccatcggctgttcatctcgcggcataagctgactcgctttcccctctcaggacaaagctgtcgctttctcacgcattatcgcagagtgtgaagatctccctctttgaagaattgatctcggctacgatcgatcagaccaaagacttgcccaagagtctcagcgagagtggaaagattggcgtaagtactatgtttagttcatcggtagcttcccggtcgctaattttccggtgtttcgacagatgccccgaaaggaaattatgaagcaaatcggtagcttgttcatcttgcgaatcaattggggaggctccatcctcgagactccagtaaggatttttgccattttcacttttgtcacgtcccggtcacactaaacactgcgatgcgaatctacttcttgcaggaattcttctggtcttatcccgatctcgagcctctttatcaagctgcacgaagctatcttgagattggtacacgaatcgatcttctcaacgcccgtgtcgaggttcgtttctcgtttacctttgtgtctcggtgtcaattggctaatcatcatcccgctccaggtcttgcaagacatgcttactttgttgaaggaaagtgtcaacagcacccacggcgagcgcttggaaacaatcgttatctggctgatcggagtcgagatcatcttgggaatcatgactatcctggttgacgtggtgtcgggtgcttaagaggatgttgtttctgttaaatcgcgccagtgactaggctttgtatcaatcggattgccataatcatattgcgaataacctcgacccctgccggagtgacgagaggaattggagaggcagtccggatgacgaatgacaaacgttttgcagccgttgctaagattgtcgaacacaacttccatatatatataaagtagatttcggataagtgtatcatctttacagtacttgtcgcaaacgctagggttccatgttcccttacagtttgtagatcagcaggcatggggttgtcacgcaatgtggtatgacaagtctctgcctatgagtgctgacttactgattcgatgctgaaggtcggttcaagtgcgcaggtgcaatgcagacgggcgccatcttaataaggagatctcagaaagcttagagaagaaatggctggagtgatcacctagctaaagcagcggatcgatgtttacgccaaaccactatgtgggaccgatgccaaagtttatcggttcctcgaaaagagttcagagctcacgttgctggctcgattgaagaactgtttgagtataagcaagtattgtatcagccgagaccgccttcaatctctatcaatctggctgggactcaagtacggctcaattgaagtcaacctgcggtgtctaattggcccggcggcacactggcaagcacggacgggctccgcttgatatgttagtggtcttcccgatacactaccgcagcggaggtaatgtttatgcgatggcttgttgctctgaagccttcgaccctaaccttgatcgcctgggacaagcttgtccctcgtaagaagaggaacattgcctaactctgcaaagtcagggttatgcccttttcgaattgttggtctgactcaccgctggcaaggatattactggtcaggcgagggagatatttgggtgggctgttgaagaggtgagaaacctcaaaccgcaaaatgtatcttcttggtaattcatggcctacatggaaaattggggtcattgggtataaattcattggcaccgatcctgcccattgcgtgcaagtgtctttgtgcgggggtttttgcatgcgatctgatagcgacacgcaccttactatgtagtctcatacgttgcgggccgccgcggacggaaagacttcacggcagtagtatctcgggcaatgtaaacatgctctgggtatgagagaccggtcctgacaaggatctttgcgttggctatcacgatcggtctctgcctggacgatagaggtcaccgtcgcgagctagagaacgccttttgcgcggcatgctgctgggtccccgttgacgcttaggcgggatgggatccacaccatattcacactcatcgcccaatcatccgactcgacctcataggctgcgggtcaccatcaaagattcgagtgatcgcttccgaaaggtccatgatacttgcggagcccccgagtccgaaccgtcaagtaagcggatgcgagcccttgtaatccgatccgagaatggagaggtcggtcaacaggcgccgactttgccccgaattatgtgcaaagatcatgccaacggtacaagctatccgaaagtcaatacccgatcgctccctgactggggccgaagtcggtagtctcagactcgtgctatctatatcgactgatccgacgaaactacatgcctgatcggggctgtcttgcgcgttcccgccaaacattgcgtctctgacgaggatcaacgagacagaagtgccgcaagaaattcgcatgtcacgatggatgggcttgtgttttcaaagcgaacgatatatttttgtccttgtcatgcaatttcaaaaccttgtacatgtcgatatgcggctctcgaaccctcaatgaaccctggcgttgcggtggtcgtagaccgaactcgagcgaacgaaacctggcctgtcaatccttgactgcccgtgacttaaaaggcagattccaacaaccatcctccgtcaatgacgatctcggctccggtcacgtagtggttctgcaagatgcattccgaggagtacgtacgtcagtttctcgatttcgctggaaaagcacaccaagcggagacgaaactcacggtgacggtcgagatgacacactgggcgtaatccacggcgtttccaggtcggccaaagggaataccccagtccttcttgaacgcgctctgaccgcccgcgtccgaggtcgaggtgtcggtcatcccagaggggaagtagccgggagcgatggtgttgactcgtacgccgaggtctcgtcgggcaaactcggtggcaagctggtgagagagggagatggtcgcagccctaagacacagcgaacatggagcgaggagcaaacgtggttagccaagctcggtctcgtcgttgcagcctcgacgactcactttccggcgttgtagttgaattgaccccgctgagaagtcttggtgattccggacattgactgtgaggttcaggcgaccgacgcattactcgtcagtcccacgggcgcatccctgatagccacgaaacaatcactcaccgagatgttcagaatgttaccgggctcggcagctccgccgacggtcttggccgcggccaaaaggggcaagaacgcaaacgaggtgaaaaagtaggacgccgtgttgatcctgtaagtgtccaaccatcgctcgaacgtgtcggaacccatctgcttggagagaccctcgggggtctgctcgcagtcgttgatgttggggtttccttgcgagacaccgtggtctagtcggtcatcggcacgacggggggttattagtatcggctcggcgtgggatctcgcaaaaagaggttcgggctcactgttgatcaagacgttgatgtacttttccttgctcgagatctcctggaccatctctacaaaggtttcgctagtcagttcgaggtccgtcatcgcataagatcgggacggccatccaacacgcactctcgattccctccttggtcgcggcatcgccctggacggcgtggacgctcccgttgcccgacttgggcgtggccgtctggacagccttttcgagcacctcggctcgtcgaccggtgatgtagaccttggctccgttggcggccagggcgatggccgtggtgagacccaaaccggttccaccaccggtcactacggcgacccagccgtcgacggagaacagcttgttgacgttgagtgcgtcaccggcagagcttttagcgagagtgtgggaagacatggtaggttatgaaagatggaggggtataaatatatggaagaggggtaaatgggtgtaagtggagtttaatcgtgagctgaggttacgaccagacatcacaacgatcgattcccatctacgctgctgctactgctgctgctcatatatacccatctcaagacgaggagctgacccgccctcgacctggctttcgacgaattcgagcgcggtccacagactcccgaatcccgccgataacgtgccgagggtccgtcgtcgggacgcggccagtaagccaaagagcggctgacatccaccgggtctccaccttgcgcaggttggacaaccggggaacatacgctcgctgttggtatggtttccaagatcaatagacgtgtgcatcattctgtaaaatctccgacgaggtcaaagtaatccatccgcccttttgcttatcgaccaagtctcccgaacgagtgaggtcgtcgactactgaacgcgcggatataaatttcaattcggtccgattcaagtatgcgcggcgcaacacgataatcacgagatcgtcagagatcagagacgaaacgggtcgccatcgagtgacctatcgacgtgcgtccaaccaccgactttgcaaaagacacgctatgaaaactgatctcaatttcatcatacggcggtcacaccgctgggacctctcgacacgacacttccagcttgggccctgctgtacggtcgagattggtcaaggaaggagagcaagacggcaagggagccttctccccccagtgggtgacgaaggggtgggaggatcctctttgacccgagggaaatgacacgatacgtttcaggtgttgacgaacaagaaagttgagcgctgccgtaccaggcgttgaatgttacacggcgggcaagatgttcgaagataacgggctgccctgattaagcatggccggtaccaaaatcgattcctctcgaccatcaccttgctgttaagaaggcattactgtaccgcgatcgagatgcatgcatctggctgtagatgatatcgctcaacgtccgtcttacgaccatgaaacgcatcgataaattagtaacggcatagacagatcattcgtccgtcgtgtttacgtttcccttcgtctcatgttcctgcaccctcgtcacctcgcgcctcccctcaagtccggcaatcagaacgccgagctccttccgtcgttcgcaagcgggcaagttgtcgaaagagacgccctcgcgaatgcggggatgactgccaaccgacatgcctgacaccggatgtacatccgagccttgatctgaacgagacggggcggacgcgccggtattttgagcagttctagtcctcccacagacgctggattggaaccctacacacgggcttcatgccggtgtacgccccgtacgctgtcgtgccgtcatatagcctataaaggtggtcccgcatcccagtacaagtcgacttggcagcgagtcgcaggcagctctcgtctcgttctcggggctttgatctggaggaatcatggtataaatgtctgtgacatgatacgaaacaaaggaggagaagaagaagaaacagccaacgcgacgcgataggaaacaagcaagagtccgagacgggaagagcgcaacgccagtcgaacgagcggcgaggcgggataggatcccggaggagatacccccccatgacggatgtggaagagcgtattaagatcgacgaggacgaggtggacgacgagaacgagatatattaaaagcgaaaacgagcgagccgacgagcgtccatgagccgaattggattccccgcggtcggtcgaccaccgtgacgtgatcccctgctgaccacccgggaagaggagtccagcccgcttagcagttcttctgctgtccacagatgatcccgacaacctatacacgcgcgacgatgaccggtcagtaaaaaggccctctgtcctgctccgaccctcaggctcggtcgggcgtgtctgaactcaccactccgacgacgatggccaggatgagcaacgagatccagagactgttgtttcagacggacggacgacgacgaagttagccatcaacttcggcgaacccgacgcgacgaaacggagagggggagttggggactgaccagatccacttctttctcctcgcctttctggccttgacgactgcctcttcggtatgtttcaacccggcctccatgtcggtatcgacctgttgagcgtgattctcgatcgtggcgatcgtctcgtcttgctgttcgacgagcatggacatttcgttgaacatctgggcgagctcggtgagcgtcttttcgatctttttaatgtcgttatttcgctcttgaatctcgcgcagggcgccgcgggcgtcaccgtatcggttcgagttgagtagctatggcgtgatgcgagcggggctaggaagtcagcaagcaggagaggcggacgaccgagggggggtggggcaactcaccgcctgggaaaagatctgagggttctcggtctcgagcacctgttgaacctcttcgggcgtggcatcgggtttgactgcgagtagtcgtcgtcgtcgtcgtcgtcgtcgtcgtcgtcgtcgtcgtcgtcgaaatgccgatatatcagctgctggccgccccgcacgccccgttcgacgagcactcaccgatcttgaactgcctctcccccctctccttgacctttttcctaaactccttttccaccgtctggtactcttgcaacaagcccatgaaccggctcttggccgcttggacctgttgtttctgcgtcttgtccttggcgagcttgttgagcgcttgaatcttgttcttgttggacgcggtgagttgacgggtggaagcgatcagaccgtccgtctcgcgagcggcggcgctgttcggggtcgtatccaggcgggactgccggagtgggggtggaaaggaggggtcaggattgtcatcacttcgacgacgacgacgacgtgcgggcgataggagactcaccagactagccacatgagcctgcctgacctgctggatcgcatcctgcatctcattcaagctcgcgttcgtcgccgtcaactgtcccaggatcacacgattgagggggaacagtcagcctctctcgaccgcctttctttccccctggccgtcctcgtccgaatcgtttcgaatggactgacctctgcccagaaatccgagaccccggtcccgttcattccgacctgctggactaccccacccgctcctccagctcctctcgtatcatacccatcctgctgtccatactgctgatacgcccccgtcgccgtataccctcccgctccgactccttgttgctgttgctgggggggaacggcgcccataccgggtacggcggtgtacgtctgttgaggctgggcggcgtaggggttttgttgttgttgggacatgacgggcgggtaggaagaaggagctgggtgggacgagtcggagaggttgtcgctggggtccgtttgaccctgcgtgtgtgatggtcgtcggggtgggggttcgataccaggatcaggatcgagatcaggatcagagtgagacgaagaggtagatcagtacgccagtcttcatcgtcgtgcgaccccgctcctgatgaacgtattcgagactcacccgtcgttcagccaacctattcctagccatcttgtctcgagattatacgcccgggattgtgatccgattgatccccaagaaggatagaggatgaaacaaaaaggaaggaagaaggacgagacgattggatgtctatgagtttccccagagagagagagaaaggtacgttggacgttgatcgttgatcgttcggccccggtgtatccccctatttctgttctatcccttgtcctaaacccgtgagatccgtggtgcgtaatgcttgatgcgtgatgcttgatgcgtgatccggatcgatcgttcgataaataaaaggttgagcaaggccgacgaggaggtcgaggtcgaggtaggacgggtgatgacctagggtcgactattgatgattgtgaggagaggaggacgagtcgagagaagagaaaggactagggtcgagggtcgagggtttcaagagggatgtagggggtgggggtattgattcggagggaacgtttcaaaagtggactagagtgtcgtcggtggatgatgatgtggtgtatcaaaggagagattgtggtccgaggtcgaggtcgaggtcgaggtcgaggttggttggttgacaggttcccccctggtgctatggtgtgtgtgtgtgtgtgtgtaagcgagacagggcagggagaagggcagggaggcaggggaaagaggcagagcagaggggcatcacgcgtttcggaaagggggaaaaagatgacagccagccagccagaaacacccaaaatggacacacacacagggcaaaggggggggggggggcggacggcgcccgagaagagaccagcgtcaaaccatcgaccatataagagcacgattgtaaagcagcttggcaaggatcgaggaggtcatccttgtcggtatactactctgtcaataataaatgcacctcgtcgtggttgatcagtgcattgttgtttgttgtcgtcaatcgtcgtcgtggtcgtgatcgtggtcgacacgcggaaaagagtcaaaagtaacctacgtcgtcccccccaccggttcgtcacttgccgcgtctcatctcatcgacatcgacatcgacatcgacatcgacatcgacatcgacaacgatgataccgagtagctcctatgcatcactttgcacacggaaaagctggtcaaaggcggagaatctcgagctcgtgtgggttatggtttcaatccatacggcgagcgcgtccgtcatcactgaatgggtggagagagatcgttcgcaaggtccaggcggtggaattccagatctaccgtctctcgtcgtgtacacatcgttcaacccccattctcatcaaatcattctcttcgtcactgtctttctctctcgtatgcgatgatctcggtggaccaccacatttaattgttatccattggtaaataccactttgagcttgaccccccctctcttcgcgctaaacatgggtgatctgggatgtgttgatcgcacctgactttgtcaacaaaccagagtgggtgtacccatatcatgcaccatcgatgcatccaaaagcgatagtaccccggtctcgccttacatctcaccctgatacctctctgtacctcgactcgttgttgtcagcatctcacggttcatagaacctaacaaagaccttgaccccagccttgattacgaccccgacccggacgacctctcaacatgtcaacatcccacccaaacccagacgcagacgactcgttcgacctccctaccgggtcgaacaccagcatcagttcggacctggacatcagaggcatgggcatgggcgtgggacttggggacgagagtgatctcatggacgagctctctttagaagcccaggcgagggtcatggctagtccgagccaacgtcgggcgggacgtacgcatcatcagcaacatcaacatcgagaggaagaggaaggggtagaggaagagcaggggcgagagggacagatcagactacctcggcctaggtcaaaagtcaagtcgtcgaggatctcgttgttcgctcgtccccaggatcaggacgacgatgacgaggacgaggaaggagcggattcgcggtatacgtcggttcatactcgacgacttcgggatgaagccgacgacgacgacgacgaccgacactctgaaggtacctcagggtccgaccctgatcgaccccgtacggacagacacgccagggatcaaaaactcaaggaatctctgtgggaactacgcaagatggtgcacgtctttgaagggttcgagggatccctccgagcgagtaaacaggggaacgaggtgggtccccctctttcgatctccccctgaatctctccctctctctctctctcgagcgcgcacctgatggatcaataccccgctgacgttcccggcctttcacagagactggcagaacggacgagacatacagactcgttgttggattcttacatcctcttattgagccagacggaacatactcaaaagctcgtgctcgatgaaaggtggaaaggggtgtccgatgtgagtcgctcccgcgtcggaggctgcatcccctcccatcgctcgtcctgcctacgttccgattggagctgatatatcccggctctggaccctccgcccccctcaggacatccggcagatgcaagaacagacccgtcaagctcggatcgagatggaacaagctcaagcgcggaaactccaggcagagcgggatcgtaaacgggcggaagaagaggaggaagaggagaggaggcgcgagttgctcgatctggagaacaaggagagctgtcgcttatacacatctccgagcccacgagactagcgctcccgtggtatctctcgcccctcccgcgcctcctcctcctcctccagctccgacgtccgccccgaaataccgactggccaccccttcccacctcttgaccggcgaaaggtaatcatccaacgtcaacgcaaacgtcccgttggccacgagcggtcgatactggataaactgcccaggggcgattcgcggggaaagagacccggacatgctgaaccccaattcggcagtcgtctccaggtcaggacggtacgtcgtcgagctgactcgcaagtcggacaactcctggtcgacgtagctggttggcgcggtacgtcgcgaagcggtgatcgtagattcagcatggggtcatccggggttcagacccgacgcgacagacgagactctgagactcactacgagctcacggcgttgcccgaggtgaacgcagtgtacgtgatgggttccccgggctgggccgtactgatgaacccggtcgtattgtaatactcggccaagaaactcgtaaacccgccacaggccgagccacacaacctgcggaccgccaacgtcgagagggtcaggccagctcgtcacttcaaaagtcgccactggacgacactcacccgttcccggtaaacacaatctcctcgctcgtaaacggggccgtcgggttgacaccctcgatctgcgcgtacgagttttcactggcgaactgcacacggttgctcgccgacaagacggcggatccgatggggaaatcgacaccggggttcatccaattatcagaggccgacaacggtcgggcgtcggcgtcgaggaattggaccgggttccagtctgtgtcgggccacaacgatgacgacgacgtcagtatggggggaaggtccgcaaacctggagctcgacactcacatccttgaacggtggtgggcctgtcgacgtacgcctggacggcagcttccgacaagttggatttgcggaacaagacctcgaaattgaggtcgggttcgtactgaccacccgcgagggccaattgcaagacccccgagaggtagacgtaacccccgccattgttctgcaaagcgtccgcgggcaacctcgacgtcaacaagttctgcggggtagtcagcagcggcaacgcctactcaccgacgtgtcgacgaggatcctctggacgcccgcctgggtaaagttctgcagaccaatcacgatatccaaaatgaaccgattgaaacacgtcgccgtggccggctgcggatcaaacgtcgtcacaaagatgacccccgtcttgatcccaccggtacgctgttgatcgagcgcataaaattgaacgtccctcccacccaagtaggatgaatctcgggtcgggtcggaagacgatccaaacggccatacggacaggctggtacgcgccgggcactcgcggtaaagcgtacgttgagccgacgagctgttggcagagatgaacgaccggagttcgggcaactgtcgaggcgcaatcttggcaatgtgaccgagtcgttcgtccttgggagaatcacccgagcgacgaccgaattcggccgacctgatcccgcgaggcagcttgctgagcaggtcactcgtgtcaagctcggtcccgttgagcggtacggtcgaattcgatgggttgctggtgggaaggtcggacgatccggacgaacatcgagccgaaaagctgcgaggcgagtccaggtcgtgtcggtggagtgcatttcgggtgcggggggagtctgtcgggactcacaaagactcgccgctgtcgtatgaaaacctgtattcagacgtccaataggttcgccaggggacctaccgcgtagccctgtgatatcagcccgggaacctgatcgtcgtaaaagacctcgactcgacgtacgtcgatatcatactcgccctgcgttccattggccacgagcgtcaaccgcagggaatcattgtcgaaccctcgttgaacggcaaacctgcccgggtcgtggtccctgagcgaaccagccacgcatcaatcagcctgtttgtcgctacgaccacgtcccgtcttgactgaccatccaccgtactgcaccagaggactggcgaacaacgagttcaacctctgttgcttgtcctggtacaccccagccctatccgccgcgccatccaggtaatcccagacatcctgtccgtccaccctgacgacccgagcgccagccactcggtccagatcgatcccgctgtaaaaggatgggtcgatccggacgtactctcgagcgagaccttggatgtcgggggccacgtagatcgaggcccgggcggtcgggtcggtggagagcgcgacgagggggactccatgggccgtagcgaaaaagtcgtaacagttggctggcagaccatggcgaccggttagttcaaacaggggcactcggtgatgacgatcgacgagaagactgactccaataataatgaccgtcgttcaaggaccacactgttgcagcgcagcatcccgtcgtcccgcgtgtcagccgcaacaccaccactcgatcgcacggttgattccagcactcactcaaatcagagacttccctctggaaagcgtaatccgacgtgtacaccttgctctccatctcggtcaaccgagctcgaacgtccaccccttgatccaggatggaacccgtcgtctgcttatggttctcctcgaagctgtagcccgggcgggttcgagtcgcacggggacacggtcagcagggctatcggaacctcgtggtgcggatcatccccaacgtcacacaaggcactcacacatcgagcgtaagcatcccacggatatactcgagcgtgttcgttcgcaccgagtcggagaacggagtggattcgaggcatgcccggacggccgagggggagtaggctgtgaagatcgggtcggtccggggtgagtatagaggcaggatccgaggagcgaggcacgttgtttgggaaaaagaaatgatcgtatcagtcgaggctcccaggcaagattgtatgcgagatgatagacccaagacgtactggtattactgctcgtagagatagcggcacatcccccaccacccccggtcgtccccgttccgaattgtcggcgctgcagagctgggctggcgttcgaagcggtgagagagccgagtgcgaggagagagagaaggcgagtcgaggtcgatggtgagggagacatctgtggcgttgtaaagattggcgtttggtgcagtggccaacacctgtacgagctcagagtcgtctgtttgagaatttgttcttgttcgttggttgtcgaaagatgaggcaggtagggatgataaagattgtaggtcccgacgtcgctttgattttcaacgtttccgagctcctttgatatcaaacgggttccacacgttatatgcttttgacgactggtcgactttgaagtaagctctggccgatgagggttgccgatgtgagccgagaacgagatacgaacgtgctcgaattgtcgtcaggtggtcgagtgtgacaaagtgctaatcgctagttgctagccagctcaaagtcgaggtccagcttggtaatgggtgatgggtgatggtgatgttgagatgatgatccaacctagtcctcgagcggggtagcgaacccaaactgcggggaaaggaaagcttcggtcgatgtgacgatggttattgatgggtgatgggcaggggaatgagagccggggggagcggatgccgtcacgcgtcgtcatgtgatccatgtggcttgccaagacaccgagtcaggtcaacgccacggcgctactagtacacacatgccggatcccggcaaagcacaaacatcacggatatcccggcgtgtttcagggcgaccaccagtgcgcaaatctcgctccacctcctctcagggaaagccacatgtaacaatcagggtacaacgtccgtaagtaccacgacaacacagccctggcgcccgattctaagacgagaccaccgtcaaaccagcccaacgtcggagaacccctcgtccgatgtcttgctccgggaacaacggcccgtccctatcatcaccccgaacgccccgaaactctcagcctcgtgctctttgatagcgccccctcacggaccaatgtcatcccgtcactcacctgacgacgatcgcagcgtgtgcgttggggacgtcggggaaccaggtcaagaaccgggtcgtccgtcgcggatccagaccgcggttcaacatctcggccactcgatgttgaaccgaggtcatgtagagtttcgggtcccgtcgaggcggcgccgggggagaaccgtcgacaaggtccgggtagcgccagcaagtgactagatcgtcattccgccgagagttcgtcgacgatgtactcgacgtctctagggccagatctactcggctgatggacgaagcgcagtcggaactttgactcgggggagagctcaagcaggatcccacgtgcgattcccctctgaccatctccgagtcgttctcggccgagtcactcatggcctccaggtcatccatcccgaccgctctagctgcactagccatcaaccctgccccatctccaccgtccgaagaaaccttgtcttgagccgaactgatcagtcgggtgagctcggccacggctaatactccgagcgctgaagaatgcgtggttgtggagagaccgtgcacgagagctgatcggacttgtcctaggagacgaacacggcggcggctgtcaagcccggtgaagaggaccggttaatgaggtggcaggcgccagttccaggaggtttgaagggaggactcacgaggtgaatgagtctcgatggaagacgatcactctgcaagcacaggaagctcctctcgaatcagctcaaccatcggatgacgggatcgcttatcgtgaggttctaacactaatatcatgaagaccggcgtcaatactgggacagaagcgtaaaacagctaaacccatccgcctgatcagtcgtcgacctgaacgagacaaagacgctgctactcacccaattgtaaggtcttcggaaacgaagaaatggaggcaggatggaaggagccacacgcttcgtcttgttggccaggacgatcctcatgatcgagacgataaattgccgatcgtccagccgaaacgaggcgcatctcggactataacccttgatgtgtgcttcgtcccggggaggcaaatagggagacctccagggggtttgagactgggttcgttcggccggttcgatccggactacgaaccggtcctcgtcgacgtcgagaggtaagcggatgggcaggttcttctccacgtcgtacagctcccggtatgtcgggggtgcgatgtccggttcctgctctcgagcgacactgtaccaacgggtaatgaggtggtcgctgtcggtctcgatcacgacgtcgtcatggcgcttggtcgaggggtcgtacacaaaatgatcatcccgatcgatggtaccggtaggataaggtactgtgctgtcctggactctgcattccgaatccagattggggtcagacgaaatcgatcacagacggacttttgcagtactcacgcattcgcaaagatggatatggactcgaaccggttcatggcccttacaaacaccccgttcggatccgccatgacctcgagtaaaggtctacgatcgcgctgtcgcccatgctcgtcgagttcatcctcgtggtcgtcgaatcggtccttgtaatacagttgatcaccgctacgaccgagcaaacagtgtccatacttgaccgcgacccattgccagaacctgtttttgtaccggagtatccccaagtgcggagtcgccagtgtgctaagagagaccggtcgatgtcgctcgaagaacccgctgcctgaagcttgcaatagtcccacaaggtatcgtgctaccactgtaagaggttcagcagtactctgagaggtgttcttgtcggaagctgagccactttgcgccactcacgtccacctaaactataccccatcacgctaaactctcgaacaacgataccagcgccttctagcttgctcacttcccgcttgacctcgatcaagattcgagcagcacatacatccatgccatcataagtcaacgtcccgctgttagcggtgggcaccatcacgtgcaaagaactggcatccggccgagtctgcacatggtcggcgtgtacccgctcgacctcttgccgagcgacaccgaggtgccgtggtgaacctgcgggaaaggacgttccgaagcgcacatgcggcggatagtagcgggatggaggatgtcggtcagcctatcaagggtcgagctgaacgcacgtcggccatccgtggacaaaccgtgaaaagcctgactcaccccacagtccgtgaatcaggacgagcaagtgtacgttcttgctagatccgttattgcacttgatatcacggaggggatgcgagcactgagacattttacagtcgaagctaggctgattcgtgctggaatacgaaaaccgacgtctgtatgcagccacggtcggcttcgatgcgtgctacacatagacaagcacaagagacgacactcatgtaggcgctaacgatttacctgcatctagagacaattcaccgctctcccttatactacttcacccctatgtcgctccacatgcacacaccgcacggccgagaagcgagaagtggacccggttcaagcttctttggcacgcaagagaaccacagattcctttgtcccgatgacgggcaggacggagcgcggcccggggttgacggagtgacgatcgaacatgcgctccatctcctcaaatgtgggaaggagaaagggctgacaactcttcagaagaaccttgaacaagctatgaaaggctgtcgaatgctgcatcgtcggacgcttgcaaccagggccagttgtatgcgacaacggccggaatttgcgcgctcccctgaaggatcatcggcacagatttgagacaggtttgatttgccccggtgccctgatgacgatctttcttgaacaaaggcaggtctcaagggggtacccgttccatcgttagtggaacagtaaatacggaccgtccaaaatgccgaatctttcaaaggggatcttgctgcgagaagcgctgtcgaccaggagacgggctattttgggtgttctagtccgctacacacatcaactgtaaccttggcgataaacccttgtaccctgtctgcttatcagtgttttgaggtctggatatacgacagttggaaaggtggcgttggggttcctcttgttttatcaggcgcgtcctctagttgttgtttttctctaaattacgtaatcataaaatcagggatcaaggcgacatcgatccaccttcgaggtcgaccacaatcacaaacacacttgtaataaaatgactgcgaatcgtcctgatcacgggtcgataagaacaacctctagcactgccaggcctatcgagatattctgaaggattagttgctttcgctacgatcccgggaaagatgcgatacctgagcacgaccatcgctgcggcgttgtttctggctggtcttggtgctgcacagcgagtcgcggaaggcggtcaatgcaggtgagccttgatgaccacgacgccctgagcctggtgtcaatggccgacttgaccatcatcccgtctctcaatgcttgtagtcaatccaacaatcgtctggatggagctacgggcaactttgtcaccgactgcgatcatcagacgtattgcaccgacgcgggaatctgctcgaacaagacgtgtcgacaagacgaggtcagtccgagtggctcgcctctttgacaccggaagaggagctcattgcgtctgtatcgccgttcactccgatagtacccattgggatacaacgaagtggcctacacggaccttcctcggctgtgcccgcaaggagagttttgtccggatgagatgagtggatgtatgccgcaggtgaccaccggacagggttgtcagctcgacagagacggtcagtagagggtctcacccccggtgcacgcccagtgacgatcaaaggagacgactgacggactgtttcgttgatccatctttgcctacccgatttcgcgcattcgcccttgttttgacccggatgacgcacgcccgtcttacttcatcgcgccttttctcttggacgtccttgccatcaaactcaacgaccacagatcaatgcgcacccccaccctcggaactacgattggctggagaattgaataccaacggttccatctgtctcaatttcgtctgccagtcagtatcacccaaaaactcgcggcgacaaccgacgcgaagctgacgcgatcgggttccgacgtccgcagctgggcgaacgcgactctgggccaggattgcgtctttgagaacagggcgtactcggcgtttgatagcagtggaggatcgtatggttacgtgttttcccgtgacaagtgagtcgacgttgcaccccgcctctgtgccaagtgagaatgctgacgtgatgcccgccggaacgacaaccttatcctagctgcgcgaacgggttgtactgtgatgttcccacttcgaagtgtaacaaggacaaaaaggtcggagaggcttgtaccgccaataaagagtaggtcggcctgtgttacctctgatttccccaacatcacaccaactcgaaggactgatcgtgcatcgtcctgactgcaggtgcgaatcctactggtgtgtcgatgacaagtgtcacaaggccgctggggatcctagacgaccggccacgtgggtctacattgtagtcgccatctgtatcgccttgcgtgagtgctcaaacagcggaaagatgcggttgcagccaggctgatgctgaaacgcgatgatagtcatgatcgggatcggagtcggtctctggttgtggcacaagaagacgagggagaagaataggatcaagctggaacagtacgagactgaacaggtgagccgccagtcacaagtcgacgtcgtcacgatcgcttgctgactctgattctgttctggcgtgctaaagaccgcttatcgacaagccttgctgtcgcttagcaacgctcgagagtctatcatggcgttgccgagagatactgtgcgtgctcgggtcaaagtttgctaccaatggcgacgaaactgatcaatcccccatgacccgcagcccgaatacgtcgcgcgacaatcgctatactcgctcgacgggtaccaagctcacaataggggcggttacgcctcatccatcgtcaccggggagagtccacctgacagtcgtcgtccgagcagtttcggttacgaagatcgagggaacgaggacgacgtgctcatcattcctagctccagagctcgtcagggttgattgcgagagcgttgtgggacgccatgcccggttcttcgtttgcatcgcatctgtatttcctctccatgtagccgcaatcacggtctgtctgagcttgctatacatttcctagacgacgggtcagattcgatcacctgttgacgatgtggcatgacgtcagcaagattccagtatcttagaagcactcactttggaggacgatatcatcaagcagaggtgtatacaattggtctctcggtatctgctgtctctcttacatgctacgctcttcgttaatcactagctgtaggatcaacctgaggacgactcgcactgtggcgatccgaaacacaccgaatatcatccgacaacgctctactcgatctcccgcaacctccagggccatggcttcgattaccaaatacctcagcgccgacgaggcagccaaagtgagacgctgtacagcatcacgctcgtgaaactgtgggctaatggatctaccgtcgtcagatcgatcaagagttgatgtcagatgaaggggcatacacgctcgaccaggtctgtccacttgcccgcattactctgaagctgtcgctaaacgggtccatccgtgttcatgacagttgatggagctcgcaggactagcatgcgctcaggtgttggccaaggcgttcagcctggataaatacaagcgggttttggtcattacggggccaggaaatcaggtgaggaaagcgttttcagcgcagagtcgcgactgtgatgctcatcccatggggatcttgatagggaggagatggactcgtcgctgctagacatctaagtgagggccttggggttcgtagcgtcgaatttgaagctgacgggggctttcagagatgtttggatacgaacccacggtataccaggtcgcagtgagttgtctcgatgatgtgtgtagatttggccttgtaccgatcgtgtcgatgcaggaaccaaagaaggacatctacgtccgtctcaccaagcagtgtgagaacacgggggtgcccgtcatacacagcgtcgaagatttcaaggccgtctacgaaaagtctgacgtcctcatggataccatctttggtaagccgagacacagctagttcgttcgcaagaccacgccttcatttgtcgtcttctggagcaggcttttcctttcacccacccgtgcgaccgccttatcatgtcattctgaaccatattgctcggaacaaggtccccatcgtcagcattgacattccttccggttgggacgtggataacgggagacaggcgttgaaagataccgagggcgacgaggtggagacgttcgaacccgaggtcttgttgagcttgacggcaccaaagcggggcgtacgagagtttaggggtaggcattttttgggaggaaggttcatcccgacgtgagtcagacggcgattcccagacttgtactcggtgctgatcgatggcaactgtcgagctcgaatagcaaggtacaggaaaagtttcaaatggacctccctgcctaccctggcacggatcagatcgtcgagctcgagcgatccaagttgtaacagtcgtcgcaagacagggcaatgtaagcgatatcacaaaattccatgtgcatttcattcctacaaattcagtttgctatacaacgggccgggtcagaaacggtctttggagcgaggtccaggtcgccaagacgcgtcttgtgtcgcctgcattgcacttctactggttgagagactgtgctgccgccttgagctgtcaagttatgaagagtctcgaattagtaacgacgtccggtacgggccgagccaagatcacgtctttgcctgacctcttccctgctctttggctgctccaagctgttggcggtttcgttgtcgaggatgacgggtccagcgccagccatggcattggggttactggcccttagtccaccggactgttcgggatcatcctggagtcccgaagggttctgtccaggttggttgtccttggccgggtgaggctggatggaaaaggctaaagggtccaggtcggtccgagtcagcgaggtgaacgaggtgcagtgtctcgcgatgggacccacattgctcttcgttcttgttatcagaggacattatgcgtgtgcttgtattgagaggtggctttggaatggagcacagagatgccatgtcatgcaagtcagaagttgtatcttgttgttcaagaggtggcgagccgcattcgcggtcaagaccggtgagggtggacacggaagcaaatgacgaggtgaccggaagcatatgatcgatgacatcagagccctacgtacaacccaacaaccccctcacttgccggcccacttgccctcttcctgcatcatcgccagacaactctcgatgactcccgcagcatggtcacactcttgttcggtcacgttcagactggggaccaacctgacggcgtcggacccggccgtgaggaggaggacacctcgatgcctggcgcgcttgaccagttcggccggggcggcggggtgggaaaagggaatccctcgcatgagtcctcgacctcggatcggcgagggaatgatcgaggggaacaaccgaggcagacgagagagcagtgcgtcaaagtgcgcggcagtgtcacgcatggtggacaggaaatcgggagacgagagacgagagatgacgtggtgtccgatccgggtggccaaaggttgtccaccgaatgtcgttccgtgcatacctaaagagcgtcggcctcgggcgttaacaatcgagctcgggaacgtgaccggcagacgtcgagactcaccgactccgacctgctcagcgatctcgtcacggaccaagatggcaccgatagggaacccgtttgccagcggtttcgccatggtcacgatatcgggtctacaccggagacgtcggggaagtgagcgaatcgtttcgacgcccgagtcgtctcgcgagactcactgtgcttcagcggggaaatcgcaatgcgcccacatggtccccgttcggtacagcccgcactaaacgtcgtcgagcacgtagacccattgtccatcagtccatgtaaatcctttcacccgactcgtcaccaccatgctgtctcacctgaatctcgtcgtaaatcaagacggccccgacctccctggcccgtttggcgagcgcgacgaaccactccttgctcgcctcgttcaacccaccttcaccctgaatcggctcgacgatcaccccgcacacctcgtcggtgatcagtgtggagagactatcgatatccccgagttgcccgacccggacgttggggatcaggggggaaaacgggagttgatatttcgggttgggcgtcacggacaatgcgcccaacgatcgaccgtgaaaggcgttggagaaacagacgagcgaggtcttttcacccgatgacgaggacgattgtcggttcttgccgacgagacgggcgaatttgagcgcaccctcgttggattccgtacccgaattggtgaaaaacaccttggcgcccgtcttgccctctcgggtgagaccgagtccgtggtgttccctagtctgggtgacgagtagctgagcgagttgaccggcgtattcgttccagcagacgttggaagagtgaacgaggcgggacgcttggtcggccatcaattgggcgatttgaggatcaccgtgaccgagcgcgttgacggcgataccggcggtgaaatcgaggtattccacacggtccgatggggtcgacgacgaagacgacgacgatgttgatgatggcgaggtgggcgacgtggcgtagatcttgcatccccgaccgtgcgtaaagaggagaggaggtcgtgcgtaggtgttgagcaggtattgcgagtggtcgtcgatcatcgcctgtgtctctggcgagcacgtatccggatgcgtcttttgtcggaatgacgtattgggctgaggtagagacagggagacggatgagcgacggcgacaacgatacaatctcgggaaaagagtcgagacggcgatcttgaaatcttcatacctggagtgtcgacgaggcgtatccacgcatggccgtcagggacctgcccgtgcggcctgttttgttcaccaacgatcgaagcatcgtatctgatcgttcaagtcgctaacgacgaatttttggtgtgcgagatcgtagactgatggaatgagatgttttctagacatgcaatgatccgattgatgactcgaatcgacctcgactttatcgagataaggtcagagtaagtatggcggaagtaaatagtcgggttcgggtcggaagtaaactcactatcaataaatcggtgggatcagaggtctttctatgacgtgtcaatctgtattattcatctcaacaattcgatgatcatctaatctcaatatcaatatgatgatacttcattcaactgtgttgttgtacttgtcgaaacatcgacggcagcatgttactactgatccggtagccagcatctaccaccagcaacgtcgacaccccgacctgaccttgtcgtcgtcgccactctcgtcaggatggcctcgtcgaccccgtcatcatcccatcccatcaaactcaagctcaaactaggcggatcctcgacgacccacgggaccgcatcaaatggacagtcgagttcgaccatagacgactgggatgaggacgacctgttgagatcgatcgataatgatcagtcgaacgtcgctggacccagtagtacgcccagcggtcgtggcaagaagaccaagaccgcatcaaagccggcggttcctatggcgggtagatcaaagttgaagttgaaactcaacctcggtggcaagtcgacaccggttaaggacgataaagacaaggccaagggggaggacgtcgtccacgtcgcatccaccccgaagatcaagtttcatttgaaaaagccgagtacgacgagcggtggagtgccaagcggtgatgaacgcaaggacaccgccgaagtcccgctcgtgacccctatcaagccgagcaagaggaaacaggcgaaacccaaactcgacaacgacactgcgaccgaggccacgagttccgggtcgacgatcacccccaagatcaaggtcaaactcggctcggcttcgacctcgctaggctcgacgtccgtgccgtcggcgtctgtcgacccggagaaggaacaaaaggacgaggtgaaagagcatgaggacgagatgatagaggtccttccgaggacgcccgtaggaaaaccgaaattcaaactgaaatccaaggtcgcctccgtcgcagggtcgaatgctagtcctagtacggatgtcggtcctgcgccggcttcgacgtcgacgtcgaccctgaccccgaccccgacctcgacgccgatcccgtccggtggatcaccgagcgaggctaagtccgatcacgatgagaacgacaccccgagctcgcccatcgcctcaccgttggcagggaaatctaaacggccacgcaatggagccacaacaaagaccgggaagaagcgagaaaagagcaagttgaggcaggaagtcggagtggacgatgtggtcgagccgggtgtccaggagcaagtccaggaaaatgcagcgagcgaggtacatgtggaagtcggggtgcaggagatggacgtcttggatgtcaagcaggaggctgtcacgggcgtgatgcaggacgagccgacgacgacgacgacagcgacgaccggagaagcagccgcgggaggtaatccagacgacatggatcaggatcacgatgatgatcacgacgacgacggcgaccaggatcacgaccaggacgacgaaaacaaccccgattcgatggacgtcgatggggatggtaatccgatcaccaaacgacatccagctcatccgaaccgaatcccagggggtaaaggcggaggaaggaacaagaaaccgtttgcctttcgaaaaaagccgctcggacacttgttgaccacgatcattggcaacctccgacgcaaagacgcgtacgggttgtttttcaatccagtcagcttggaagagtatccaaattatttcgaggtgatcgggggcgaggacagggcgatggatttgggcacgatggaggacaaggtcgccaagggcgattacaagagcatggccgagttcgaggtgagtcccacaggcggtagtctcgacacacccaagacgacgactgaaagctcgtggcgccactgcaggacgacgtcgacaagatgatcacggcagcccagaaattcaacccagatgacacgctcgttcatcgtgaagccgccaaggtcgcccagctggccacccgtcaattcaatcgtttcagatccctcgtcaagacgcccttgcccagccccgagcgtgagacgtctgggatgggtactcccgggttcgcagatctcgtcggaggatcggtcggaccgacgccctcgaaccgaagcgtcagtccgacggggacggtatataaggaggctttggccgcgggaaccctcgagaggtcggccgtggcccagttactacctcgtcagctcgtcccagaaggtatgctggattaccctcccaactcggacgtcgcccggtgtgtcggttggtacctttcgggagggaaacgacatcggtcgaaaaaggaacagcgagccaaggaaaaatgggatggaacgtggagagagtggaacgtcgacggcgatcgaaatgttcgcgaggccgacaacatcctcgacctgctgcgccagggattcacattcgagacgagcggactcggggtcactctcccgcgcaccgtcgattggcaggacgaggccatgaacgcgagcgatagatggcaaccgactcccacgctcacggggatcgtcgcggacgaggtcgtaccccaggttcccacccgtccgatcgatcatttcgacgtggggcgatttcaaaacctcgccggctcgtacggctttcccgagtttaaacgatacgacgtgcgcaagtttgttcgcgatctcacggtcgatctcgaaagcgtctggagagacgaagagacggactttgtagagaggcccagcaaggtcgtcaaggagatgtgtctaggcgaagatatcacttcagaggcatacgtgcggagcgtcgaggcgttcttgtcggggccacgcaatgacaacgaccgcaaaaggaagcacgtcgaggtagacgcaagtgtcgtcaaggccgagacaaaaagtgtcgacgcgcacgatacctcgggcttcgacctgggtatgtcgttggaggattacgtgaatacaagatggagggacggttggctgcacgccggcatgcgagggaccgtcaagcggacgcaggaaatgtacagagagattgtcgcgaccgagccaggacaccaggcgaaacggcccaagctcgaggacgttctcgatgcggacgagctcgatgttggggccatcggtcgagagcttttccgtggtgtcgtcaaggacgcagccaaacggatacccatcatgctcgagctcgaagagtacgccgcccggaggaacgggcttgatctggcttgtctgctgcatgccacgaccgatttcgctgcaggtggatccgcaacgggtcctccacccaacaccggggcgggacgagctgcatggtatgaaaagtcgctcaagttggcgggagaacagctggtcgaggctaccaagcggagggctacgttgacatcggacgagctgaatggcgagcaggaaatcgaaaggatgaagaggttgaggctcgatctcgtgagtcctttacagcctccgaccttggcgatcgatcgcaagctaacccatgctgctacccaccccgcgtctctagctctcgctcgctaaaaacgttccagtatacgagctacgtccgatgacccccaccgaagtcgaaaagcttcccatggcggtgagagggctcatcaaggtcgtgagcaagccatgattctcgaggacgaccgatgtagtccattcagtacgatcaccttgttccgcgctagagcccagccgttctggccccgggcgcgatacttttcatcatgtcgattgatgtcacgatagtatggtcgatcgccgcactgcctgctggaacagtctttgaggtgatagcgtccatgtggcccacaacgggtagacggaataacacggtagataatccactccacagagcaatcgagttaatctggcagcaaccaggcgcatgcttctgtcgcctgttggatgattgggcaggtgatcgcaaggtcctgtgatattgttcgagcataagccacctcgcaacctcggtgcacagagcccagacagcgcgctggtcggctagacaatcgagggttagaatccactcttggcacggtatttccaacgtcgttctcgtgtgaaccgaggggttgcagctctcggctcgtgcaccagcatatccattacctctacagatcagcagatcatgcggcggtcgcgtcgttgtcttggcacgtcgggggaatgttctcggaggcttcagaggcgctggcgctcttctgcctccgggcaacgtgttggaacgatattccccccgatcaggattccgagccgccttctgcagcgcatggacgggtttgtcactttccgcctcgagacaatcgctgtcagctgttacgggtcaaagccgagctgagccgtctcgaggcctcgatcgcagttcattggatctcacaccaccattaccacatcgcgcgggataaggttcgggcggtccaaatgaattcgctcgcttccgacaagctcccgctatccaccatcgcgcgtttcgactttgaataggcggtccagtcgcgatattcgaacgacatagggctaggttgacgcacaagatggtcgcataatatcgtggagcatggagctaacgctcgtcgtcattaacccctgcctccgagaatattgcaagatgggttcgatgtgatatcgacaaagtccagctgaccttgtgggctcgacgacatggccctcaaagcagtcgtgtcctcggtcagattggcgcatatatacccagtccctcgagacgttttggaaggactatcacttggaataccactcctcaatcagcgctcgacactcaaagcgacaagtgcaagcaaacacctcgatcaacatcactacgacctaccgcaatggtcaagtttaccaacattgttgcgctcggcctcgtccttgccggcatctcgaccaccgcatcgcccgtcatcaatgagcaacgcgacattgaacgacgaaccacttcactctcgtgcggctgggccaagaaagacggagtcgacatgggctgcatgtgcaaccttcccggcttgaacctcaacctcgacctcggaggcctcaacatcctctccctcggtctcaagcagtaccctcccggttgcaagcctacttgtgatgcaagtcgatgcgcgcccgagtctgatacccgagtcgatccgctgatcttcgtttgccccacaggacaaggtctacgaatgtcctcacggttccaacggacacggaggatgcaacgagcccatggcttgtcctccgaaccactgcgagagctacggaaagtgttgcccgtacggaaccaccaacatgaatggcgtctggtaagtctcggatggccccggcgtgatcaaagatacggtgagctgaattggagcgtgttttctatctcccagttgccccaaaggctgcgtcaacaaggacgggaggtgctacgtgcctcatcccgagccgcagtgccccgaacactcgacctatagccagcacgagaagaaatgcgtctgtgacaaccacgagtgcgcctttgttgggcagtaccaaccgagtttaagacagctgaccggatggctgctctagattcgagatgtttgaccacaaatgcgtacctaaatgcgacaccgacaagaagaggaacgatcagggtcactgtgaatgcaaggaatacgggtgagtgacgatgactatggatgagattcgcctcaccgactgaactgcgctcccgtctgggttctcagtttcaagcccgacgagcacggtgtctgccgacctcaatgcactcatcccaaggagctcgatctccacgagaacagatgcgaatgtcccgagcacctcgtcgacgacggcaagggcggttgcaagacgccccctcccacttgttatcatcccaagaagctcaacgacgagaagaacgcctgtgtatgcaaggaacacctgatcgacgacggcatgggcggatgcaagaagaagcctcccgtctgcaccggtggaaagatgctcaactacaaagacgagtgtgtctgtcccgaacaccaatacgaggacaagcatggaatgtgcttcactcctcctacttgcacccacccattcgtcctatccggcgataagaagtcgtgcgtctgtgaaaagaacttctacgaggagcacggtacttgcaagcccaagcccgtggactgtggatggggcaagaaatggtgcaagaccaagtgctgccgaaacgatcaggaggagaagggagacggtcaatgtggctgccccgaggggtgagtcggattggtctgaacacgcggttgattgggcatgtactgaccagcttttccggcactgtagctggaaggagttgcctttgctccgcatctgcaagaagatcagcgtcttgggcatcggtctctgatcatcaggttgacgagagaacggtgaagagtacccggagacatgaagaggaggcggtcgagcggggtgacaacaaaagagaatgccacaaaaaactctaaaacccacagattaaggactatcagacagaaatcgaaagcaaaaaactgtatattaccttcagttgtcgaaatgaaccttgaaagaccaagtaccgaatgcaaactatggaattgattggcaaatacagatttctgggcgatggaccgagacgccagatcgacggcgccacccgcgcgacatgtttgatttcgttcgtcaatgaaattctgaccggctgagtgcaagtgagagagtctgatcgatactggtggtatctcgggctgagagaattcaatgagattggttagacccgccaccagagaccttttcaatgagatggcaccccgaaaagagcgcaccttcgacctcaatcgatggccgaacgcgcgatgtttcacccaaacgcatctttcgatggatccacgatgatcattccatcgaaacgaatcgtcctccttttcccgcctcgtcctttcttttcatcaacaatatcgtcattgacatcgtcattactcggcaataatctgcgtcatcccccatgacccaacctccgtcgtcgatcacgatcacgatgacgagaatattcggtctcgattggctcgtttcgacctgcttgtgttgcgagagtacaaatgtatcgacaatgggcctcatagaagacgatagcaccccactccccactgtctaccttctgcaaaggcaggatgccaggtctgtctccaaccagacattctacaacctggaaatcacccagaggttgagcagagaggcaatcatcagggaggatgacagggggtacgcatatgaggtcggcggagatgggtcctacacgtcagttcgaattcgacgaaagacaattccaacgttttccgacgatttgctcattgatttcgagcagatgcgtaggcgggtttttcggagatctctttggaagactggtctacagcatattcaaggatctgtcaggtgggggaaggatggacagctggatgggagttgatcctggaagtatgagaaagatttgtaccagtaagtcatcatgcgagatctcgcgagatcttcgttgcgttcgatgcacgtctactccagctactcaccgttcaaaaggtctgtcccggcaaacaataatgtctttcgactgcttacgttcaagccgattacacggtataccagccgacgtcgctctcgctaaagggaattcgactcgagaaacatcaagtggggggaagcagtgtatgtccggcgaagtttcgaagtattcgaagtcatacctttccattcatcggctgtactttgtgccagaggatcgtagacacgtctcgaaggctctcagaagtaagctggtcacatgtcgcggaaccgtcgtctagcccacgactgatcttgcagcaggcacagagaattcctggcaggtgagcgccggtctgcgcggtatcgatagctaaagagagaccccggtatagatcacgttcaaggagaatggactcgaggtaaagaacgctaggaaggcggcttccgctggaacttctacggcttggactgcacagaacagtcctccttcatcttcgatcgcccagtctcatggatcatcgtcatgatgaccgaccggcagcacacgtcggaagccaggttgagaaaacggaatagtaggtcgagcacatcggaagggtcggacaccatgacccggtttcctcggtcgacagcaccttgacggccccacaagccaaccacgacatccgtctcgcctcttgccaaccagcgagatcttgagctcgcttgtcgaccggatggttaggtttggtttccggccctgtctcccgtgcaccgccgacacctctagccaccctctgaacaagcacacgaacgcttagccgacggcgatagtcatatcgaaaacagagtcgaacgcgattaacgggttcacatggatgcaacaaccggagaagttacatcgatacgcggacgaaccagattgaggggccgttacatagacctagagagtcgacgaatgccgatgcgaaccagggtttatcgctttgaatcgagtcccgcctcgagatcaggttctcgatctgactgggcttcagtctcgatgtcggtctcaacgtgcgtaggcaaagacgaggggtcggccgggaatttctcggcgtcacttatttccgagccgattactgatagccacaatgtcgggtcagtggggagcccggagcagataaatccctgacttggcacttactcagcatcaagatcaacaaaccgaaagcgttaagaagtattgcgcaaaagaggatggcaccttgaccatccccctggggccccgtccatgcagaatcatggcagcataggacggccgtcatgctgaatgttgaacagccgatcacgagtaaaacgtatgctcgctgtagcttgcggacctccaaaaacctgtagtacccattctgctcagcggtataggtatccttggtgacgggccccaccatccgctcggtaatgggtaccgttgaccataggaggatcgtctcgagcccaacgagaccgatcaacgatagccagggctggggcgggagagggatgccaatgctataggcgatgagaccgtagatcgccaaaatggcgagcatgacgagtccttgacgcatagttgtaaatgtgcttagggttgctggtatgtactttggggatggtcgggagggagatatactgtctttcatcaacgcctcttctcgatgtcaacctcgcaccgtggtctacacagcaattgcggacattttggcatattttggaggattggaacgataatgtccgtctcgtagagcgctcgctcaacaacatcaaacactactactactcacttgtacagcaagtcaaggcaagtctgcgaggatgaaccgatgcgtagccatatcatatcgtcgattgaacctcggttctacaatacatgaacctggccggtctcgaatcggataagccacaccagcggagacacgtatgttgtgatgcacctcagacccgcccgacctcctcgtttccgtaatcgcccgtacactcggtctttgagaatcgacgagcaggaatacgccggtagaacagctcgtccaggttcgcaaaggttcgaccagtataatcgggaacgaagagatagatgatcacggcacagacggctccgagaccggcgaagaggaacgccgtcttgaccccccatttggcgccggatgtcgcactcagcaagtagggcagtactgcagagtttcgattcgttgagcgaagttagggtcgagtcgagcgtccaccaggacttaccactcgtcatgatcagtccgacaatcgcattcccgacagtacccagcgtggtggtcttggcgcggagccgagaagaaccactttcgcccgtgtaaacccatcctgcaactccaggaccgatggtactggcggccaagaagatggcgaccagggcgacgagcaaagacccctgagcttgactaaactcggacttggcgacgacgtcggtgatccctaggcccagcatgcacaacgtcatgatgcagataccaacgaataacaacatccaccgtccgatccgcttgttttcgatgaggaaaaaggtcaaaaagttggaagctaggccgaccgaggtggtaatgacgctcgagatgagtggatcgtcttgtttcgcgatgacgaaaaagtctgggtgcaacaacctagctcaggagcgaggcctggaagggttttccggcaaggtcacttacaagtcgcataagtgcccactaggttctgtccggtcagattctgtgagatcggagggaaaacggcgcagaatgttctcctcaaatcgatccctttgaagcagtccaagtaggtcgtattgcgatgctataaggctcgtatcaataagcttcaggcaccccgattcgatcgatgaccagcctcacctgctcgttcgcctccgattccttttcgagcgtgtattcgaacggcgacggcacggtccagatcctcatccgacgtcttggggttgatgaaggccagagtcttacgggcttgctccttgcgccccttcatcatcagccagtaaggagattcgaccaggagaaagagttcggccgcgagggtcagaaccggtgctgccaaggcgatgtagagagggactcggaaggaccgcaagtcgtcctcgcctggccaacgttgggtggtggcccatgggatgaccgtggcggcgagacccccgattcccactgaagcgagaccgatgtcaacgaatcgcacggagtggcggctgcgaaatttgcactcactcgccatgttgaagaacgaaagcatgatacctcgaatctctctcggactgacctggatacggagatcgtgtcagctcgagaagaagggtcgggatgggtagggggaccagactcacctcggtgacatagcaggggacggcagcctgcatgatcccggtggcaaaaccaatgacgatctgggcgaggtcgattggaacactcgagctcgttgcacgctgaccttgctatcaagccacatttgccaggtcgtggcgatgacttcgagcatgactccgatcagagtccaaaagacgatcgagtacagggtcagacgccgaccgaatcgatcgttgcattctccaccagtgaattggccaaggacctggaacgtggcgaataaacctccccagctgagcaagtacaaaaggcggtttgagcgtagcggacaagaccgatgcaaacagtcaccgacatacatggacagaaccttggcttcaaccgcgtaggcgttgtcgacctcggagtagacgccaaacatcttgttgaacgcggtgataccgagcagattaccgggaagggcgaattcgatgccgacgatgatggcattagactacgagtccggatgacggtaagtcaagcaggtacgggaacaatctctcgggatgctacctacctgcaccgccatgatcagagccaaagctctcgggttctcaagcaaaaccttccatggacttcttccttcggtcaacgtgtccaatccaccttgttgaaggacggtgggctcgacctcgttgacaatcttcccatcctcgacatggaagtgctctgccttttcgtcttggtcgttttggttttgatgcttttctacgggattcatcctgggcgtcaagcgattgcagatttcggggcgctgatcctgataggtatgggacagatcgattggcgatctccaccaaggaggcaccttgtatgtcccgctatatgaacgcgcaatgatccaaggggttcgagagactgtgcaaataaactttcgatagccggtggtgcatcattatgccgaaagagaccacgacttgggccacggatgacttaggtccatctcgcttggctttacgcgcccaaactggtcccgcggtcgatcgatcacctggctcctggtatcgatcaagccgccggtatctgcgatctcggtgcatctattatacctagtctacgccaagccggctgactgacggagtaatgatacgcccacagagtcggttggacgtttcccaagaggactctgggaccttgcgccatcattgcggccctgttgatcccaacgggttcgcgcgatgatgcggtcttgccccgcatagttgtgcagagacttctagcctgcttaacgtagagcatccatcgtcggtccttagagtagatagtcggctggaaagaatgggccaggtatagcaagatcgccgatgcctacttaccgaccaagtgcagagaaacgctttgctttgctactgcatatggacggacgggcctcccccagaaacggcgcgtacgagcatatccgcgacttctgctgtgcctagttggaacctcgctttcgcgatcggcttgtctctcttctggggttacggtttgggctcagggacgaggtcattgtgaacagcagactttcccagctacgggtcccccttccaaagaggaacacaaaccgggtgccatccaagtcatgcgttcccggtgcatggttgtgcgggggccgttccgtgccccataatcgatcgtgcggtgattgccgtgcttcaccgactttcagaccagactgaattgacaagacctcgcttctcaatgaccttggatgttgcagtattctgagtttggcaagccgcagctgcaagttgtagctcgaggctgcatgacccgccgtagtttggccgagcatatggtcacgattcgcttccgacagcgtgacctttgccgcccagccgcagccgacatgccccatggcaaccgtagttcaggaggatgatctcgagacttataagaagccgttgtcgtcggaagggcacacctgaaacctctcgacgacgtccgatccacctcaatcacaaccggatcttcgaccatcacaccatgtctgacgccgatcctaccgtcttcaagaccatgctcgcgggagggccgtacaaggccagcgacgagcacgttcagtatcaagctcagatcgggcgggacaaggtcaacgcgatcaatgaggaaaaggacgggaagaagaggatggagttgttcaaaaagtgggccaacttgggcgaaaagggaagtgcctacattgccttgccgttcttttgcgaatacgtgggtgccttgtgttcggtcatctccgaatgaacgactgatgcgggatcgagtaggtattcaacttgacgatcggcgatgaggtctacgttggcccgggaaacacgttcctcgatgtcaccccgagtgagtccattcgcaacgattcggtgtgcccgaatatgcactcaacctctcgagacctctggcagtcaagatcggtgatggctgccaaatcggaccgtcatgtcacttttacacgcccgtaagtcatcgtttcggcatgccgatgcatgtttgctgaagcgttgtctatcatcgaccatagggtcatcccgtcgacccggaagaacggagaacgtacgtcgagtgggctactcccatcacgctaggtaagtgtcgccatggagtaccgcaatacgcatcaagctcacgcagacctgttactcgcagaaaatgacgtctggcttggaggcaatgtcaccatcctcggaggggtcacgattggtgccggttcgacggtcggagcagggtcggtcgtgaccaagtcggtaccctcgcggagcgtcgtcgtgggtaacccggcgagggtaatcaggactttgccggtcaggaaggagggcgacgagagtgaagccgacaagaggaggaagatgttgggattgtaaatggggtcatgtagattcgattcagaggttttcgctggtctaaaggtagatctactacctgtgcttgtggcaatgcgcccagatcatcaaagactcgacgcgacaaggtcgatggaagcagtgttctgaaacgatcgagcggcaacgtgtcattgatctgggtgtacaagcgacatccagtcagaatctatgagccctgatccatctttcgcgagacatccaaaggacccccgcccacaagcacgcaaggacggccagcaacgcgacggacaagggttgtaatgcctcgacgccaaatttgcccgagagtgctcccgtgataaaggggaacagtgcagatccgcactggcccagtgctgcaatataaccgatggcaccaccagacatttctgggtccaacatcgcggccgtgccgttgagcaagacggggaagctggtagtcaagtccgagttagttgggttgaattcgacctcctcggcttcgcaacttacatcggtccaagaactaggccgattgcagcgtaagccagtgcgttccccaagatactatcgaccacccagacgagctggaaaagggcgttctagatgagcgccatggagcgaaagccgaatcgccaacctcgactcaccacctgcagtcccactgccgcgatgatatagaccaacacggcgttctgctcgctgaccacccagctgacaaagacgtgcagaacacgtccgaccatgagaccaccgaaaaagcccgagctgatgtacccgctgtcatcgccgccgtctcgcacctcgacgatataggtcaccgcccagcttccgatcgtaaactcgatgccgacgtagatgcaggccaagatcccggccagatgtacgaatgggtccttggcgatgatcttcatcttttccgctgtcccgcggggcgacgatagcacgtcttgcccttgatcagaagaggcgtcgggtgcagtcttctcacaccgggcgcagaatcagacgtcgtctcgatggctgccatttctaccatgtacttacgtcggcaatcgcctctggtcgaacctgcggtacaggcgtgtagttgtagatggcaaacagatcggtatcccgtttaaacctgaagatgtatcccaaagcccccgcgttcagagccatgatgccgaccgagcacacgtagtgcaggttccacagtctaaagttggagcgggcgaattgcgtcgctaccaacggcgagaccagagccccgagcccatagacggcgtgagcgatagccatgcgcgacgtcgcgtttggcagccgtgtgatgaagccattgatctgagcgtcttgaaggccgagaccaaacccgttgatgcaaaaggcaatcacaaagaggggaaatggcggggctcccgccaagatggctgcactggctagctgaacacgatcaagagagaggatgtgattaggttcgactggcagcgcgatacgacccaggtcggcttacctgtacacaagccgctatgaatacggtctttcccagtcctaggcggtccgtgaaccaaacgttcgtgagggcagccgcgaagaatcccaaaaagttgcagataaagatgagagaaacgatggtgtacgagacagagtagaaaccctggatccgcaggagtagtggtcccgtgctagcatcgctccagcctgcccgcagggtgtcagatcaggtgaatcaagtggaacaacgaggaaatccgctcaccagccgtaaacatcaaaatataaatcgcgatgaaccattgcacctcgaccttacgcggcaagacatggatcggagcgagccgagtttgctcccgaggtgatgtatccgatccttcatagagtttttgctctggttgatcgtccttgacgtccgtgtcgcttgttttgctgctgtattgcatcgtgaagggtagtcgttcccttcgatggcatcatcagcgaagagaggcggtaccgcagaccgagctgcttcctataagagcgagtcacgcagcgccgaccacgaggagtttatcggaaggaaggtgcggcggcatcgcgcgtatttgttcgaggttgcggctgctaccccgcacggcaatccccgaccacgtcagccaacgtgatcagcggcaagtcgctcggacatactgtaagacgccggtcggttcttggccgcccgacacgatgccatgtttcgattcataatacagtctcaaaagaatagcggtcgcgtgtccgacctggccgtcacttcgaaccaatcgcaaacatgtccagccgcgtctgaagcggtccacgtctgttctaagatgtccaatagactacccagagccttttcgggtccaatctctcgcatgaatcggcgatagaattgccgatccgtctgtttcactgcgaggctgccgaccagaaaggcaggtccactgcaaaatgacgaccaaaagtcgatgaaattcttgctcttgcgctcgcgagctcggcatagcaaaatgaccgcctgtaacatggcttgcatgtcctcgaggcgctctcgaagggttggctcaaagaccggacgttgatagacgagtcgatccaagaggacaagacccaatgtgcgccaaatttccatctcgaccgctctctctgcagacgtcacctcgaacggttcaatcgagccatgtatcgtgggctcttgtaatttgggctggtagttgatgagctcgacttcaagacggcctgcctgttcaagcgagtctggctgtcgagtaaggcctagtttcgacgtcgcgtagctgtcggccgacaggttggcgacccgaagaagcaacaaagataggccaggggggagaccaaaccactacaatgtgcgatctcgcttcagccaaggtcggcgtgcgtgcattcaagagttgctatactgacagtagtctccttgtcgcacactaaggccatgtctggaggccatgtccgggtgccaacgctatcatattcaaagacggtcctttggcgattaataaacgagcggttcaggtcgaccatggccgcgactcgcagaggaaagaattcgaggtccggaaaggaagcagcgagagcaccggggatggctagcacgtttttcaatagcgaattggcgagatcgcaagtcaggtaccagttgtcggcatctccgagggcatgcgccgccatctgtaggtccggcgccgtgttagtgtcgtatcgggacttggagagtagtgttacgcacgttgatgtccgacagggcccacagcagcgccaacaactcggtctcgtggctgaaaatcggtgccgctcagcattacatgggtgacgccaccctgcgcccccaggctactcaccctgatcgatcgagcattgccaaaccggccaagatgatcggtttcgggtcaatgtccggaactaggtattggtcgggcagggcgtcaagggcggcttggcgggaagaactgcctattggccactgcgttctgcgttctttgtagagatggaggactggccaacgacgtgatgctatcagtggcggctccagctatatttcttcgactcctacactcacacgtcgccgagaccgctctccgggccgtccgggtcaaggggcacgacgacgtcaagcttaggcactgctctgccaatttcgcccgagtctgacgtgtataggtaacggtccaagctggaatgacatatttggcgtctgtgttggagagatcgtgtcggctgtatgcgcatggatgtcggcggcgatgggcttacaaaagtcgagcaagagggcgtcgtgtggttcagatgggtcgtatgtcggcgtgttgtctatcgaggacggaggacggaacacattcgtcgtgaacggattcgagtgtgatgaggtcaggcacaccaatgtgtggttgacgggctcgctttcctcgagcggcgccaggaaggggtgcagcaggtcaatttggcccgggtctggcatatcgcaggggtccggcagttcggcttccgatcgtgtcgctagaacggcgtgcaggcccgtcaatagcaataacacgcaagtatgaggtctagaacacaccttcagattgtcgaaacggagaaagtagccattcggtcagcttggcaaagtccagcggtgacgcatccggagctgtcatgtttccaaccccggccaggtcaaaccgagtcgagcttgatgcttctggcaaaacttgcatgaccgtttcggcgtcgaggtcttggaaaaatgccctcacatcgagttcctctggtaccgccgcttgttccatataggccgtccggactctcgatggacccggcgagaggggcgtctcggtgcctagtcgggaagagccagacccgggagtctggtcattctgtcccggtcggatgcatcgccagcctccttcctgacatcgcaagcagtctccacagtcattgtactgcggaaagactgcagaggttagatcgatatcgtcgacctgattgtttctgcatcacgacttacttgctctggacattttttcctgcaaacgcggtcgagtgtcacgtcggcttgatcagccattgcgggacgccagcaggacagtattcgatcacctactttctacggcggctatgagtgaggaacgcagacaggaatgaatagcattcgcacaacgaaacttccagggactcctcaccaagtcagacaacccgttctcgacctccggagtaatcggttggcagctggttctagcgggacgtcctgatgcctcgccatggctgccaccagccgtgtctgacgagatgtttgtgggctaccttggtaggaggtgcattcgagttctctacggagttcctgggatcattactagtattcagctggtggcaatcaagtggcaagtggctgatgatcaagtgaatgaccctccaagctacaagttgtgcaaagtcgagttctgcgccccatatgcttccgaaatttgcatccgatcgttctcggaaatagatcatttccatgattatgatggagatacaacagagacttttacagagagccatcgtcatcgtctctaccgccgggtaagctccagtccgagtgcatcatcgcctagtaatgactcctgcgcatgatcctcttgctttcgacgacgatcgaaacgcaggtgaaagagatgcccacggactttgcgcaggaacgccgaatagatgattgcctgcgggacgtgggtcgcagtcaggatcaaggtctcgcaggcgaggctggaactcgctcgactcacacctatgaccacgctgatggcactgatcaaagctgtccatcggaatctgctcacgatgcaatcgccgggaattagtcgctgcgtcgttgtcgtcgaccgagtctccacgccagacttgctgatctggtcgactgaacacaaagaccatcgcccacttggcgagatcgctgacgctctgcatggcgatttgaagcgatgtaaatcgattacgcttcgggtggtgttggagttcaagctgaagacactggacttgcaccaggtcaaaggcgtaaaggcctaggcgggagagggcgaggcatccgaagagcacaaacgagatgatcgggggaaaggccgcgtgttttggaacgacgtagaaacagatcacgacggggaccagaaggagcgcttcgagcctgtacccaatattatcaaagtcgctagtagggaatgaggtctagcctacgacactgaccatatgctccaggcgcccgtcctctcgagaccgacgagcttttctccgtacggcatgacgaccgttccgagtagacccgcgatcacggtgatccctcgcatgaccgagatgaacatgtcagaaagccgtaactcgctcttcaggtaggatagcatgacgccgtcgaattgaagggttgtcaggtacaacatggagctgcgaaaaccgtcgttagctcgtagccctgggtcagacggtcgagaagcagatgaacttgcatcgacaccgagcctgttgtcgtgagggtaaacgtgtcaggaagaggcctgctgatcaacgagcacgccactcactgagaaagatgggcatctgagcgaattctgccatgtctcggattgtaccccttgcgactccacccaaagacttgtcctgcgtgacggccatgccagagccatcttccagcgaaacgtcatggtcgtccttggcccggcgacgtttctcttcagcttcttcgaggcaggtccagctgttccagactacaccgatccaccagagctctcctaaaagactgacaatgctcgcgccgagtaaaacgagcgctgccgagggatagctagcaaagctggtcaagagagagacgaacaacggagccaagagtttgcaaaagaggaacgctcgacgaagccaggcgttgaaaacggtaaggtgattcgaatcgggtgtcgaggccgagatgacgaggaccctggtagtcgattcgggtcaaaaagtcagctgagacgttcgcgaatcgataaggaggaccatgagactcgccagtctcgatcgacggcaatgtcaatgaccgtcgtcgacagcctgcccatggtagcgaatgtgatcaggtcgaacaagagcaccaattccaacaaggtgaacgatgagtgggcgtcgttgtcggtcgtcaggggtcgaccggagagtaacctggcgactacttgaccgccggaaggcaagaggtgttgtcgttccatggcaaagaggacgaggaagatggaatactcggcgatttgtgctagctacacggggtcagacgtcagggcagccgaatggctggatgcaggtgggacgctcactttctgtacaaacagtgcccatcgtgcaatccacagcctagggtactggtcgacccagttgccgatcgtgtgggcgaacacgagcgaagcgatcgtcatcgagaggcccaacaacgaggccgggatcaaggtcgtcgggaagaggacgatcaggaagagaaaagcggcgaattctgacgagtcggggcgagaaggtgagtctggttgggtcaaagagatctagacaactcgctgctcaccgaggcattgctcgctccatgcactgcagggtcgacgtcggtcatcagtttcggggtcggctttatcgagttcacgacgagactcgcctgcttgtatgttgtgccacgatgcagatgaaccctttccacggtagttgtccaggtttcgagacgtccatcgtcgattcaaagttccaacggggttgatacgagattccgtccacgaatgaatctagatctgactcatctcgatctcgacgtctgaacttcataagacatcggtgccgaggtcactcgatcgtctttgaaccttgttcctcatcctggtccgttcatcgatgaccatctcttgatcatgccatggatcacgatagagtcatcggggaaactcgatgatgaggactagagaggtcaggaacgcgcacacggaatgttcgacctcattgatcccgtcaaagagaccgaccgataataagatggtatataagtcttggatgacccccgaccgcttggcaaagtgttcgagaaagctcatccagtcacccttttcgatatcagcacccatctcgtcctctccgacatgcgtctcgtttgggaaaaactcgccctggcgaacaataatgccgaggctcaaaaagctctccatcggtcgtccaacaatctggccgtcattggtaacaaggcatatgtatatggaggagaaacacagccgagacagccggtggacaacgagttgtggatcgtagatctaaagagtaagtcgtgctgttggtcgtgatttgagagtctcgctgggctaattgaagaatgccagatggaaacgtcgaagctggtcaagccaagaccaagcccgccgcccgtgtcggttctgcgatggtagcctctggtccgagactgtatctatggggaggaagagagtcgaccgagatgaccccgtgcaacagcgacctgtggacgtacgatacgaccgccagtgaacctacgtgggagtgtctgcccatcgacaacaatgacgacaaggacatcgtcgaggagaggagtttccatgccatggccgcggccggagaaagactatatcgtgggtgtcgagacgcagggtcataggtcgacttgcccgtactgacagtctatttctagtccacgccggatgccccgccgtaggtcgttcggccaaactcgactcgctgcccctgggcacctccaaatcgacgtggacacaccacccggccgctcctggacctggccgaggcgggactgtgctttgcccattgcaagtcgatggcaaggacgtgctcgtcaggtacggcggattcgctggatacgagcttgggtctttactcgacgtgtttgatgtcgaggccgatgaatgggcctcggtcgacatgcccaacagggagggcgaggatggacaccccttggccagaagtgtgcatgcgttggtccccgtcagtccacccaagtccatcgaggacgacgagagcatcgtcgcgttgatgttgtttggggaacgtggaccggcacccgctcatctgggtcatgccggagctggccagttccatcaagacgcctttgccctcgttcgtcgtcatgatctcgtctccaatgacaacccgctcggattcggattcaaagagctcagccagacgtccgaacgagaccagctacctaccgctcgaggatggttccccgctggttggagcgaggtcgatgggggcaaggtcgtcgtacacggcggattaaatgaccagaacgagcggcttggagacttttgggtcggacggatcgaggcgtagaaacccggcagaaggcggttgtaatagcttttataccccttaggaccggttcctatcagatcatcaagctgagagcgtctcggcgtggctattgcggggatacaaactagtcgcagcatgatcgaggctggtatccgatccgtcggctgagacgacgttctctgtgtttcagcgagtctatggctggcggtacattcgactcgatgctcggatcgactctagtatgttatgacaaccagcaggaactccggaaagatcgtcctggtaggcgacaacccgctctcggacaggaacgaccgggaaggcgccaacgtgtcaatcatcctgtttcaacgatcagcagcaacaacgacgacgacgtcatcgacagctgaaaattcgcaaaggatatcatcaacttgttctctgcaggttccgatatggtagaacgttcctattattgatcaaatgcctcggaaacggccatcgagtcgaggtcgccaagcgtgaccacctcggtctgccgtttcagaatagcgaggttgttaaaccgaactggaacatcatgattgggccaccacggcatgctcgtcccctctttccgaatgggagtgacctgaatcctgctaccgagctgagccaaatcactcgttccggaatatgaaccgaaggattactttttcggatccgatgatcatcaaaatccaaattctcctttttgttcgcgtttcagaataaaaagtccttctcacgcatatccttgttttcattttttctctcttttgcttcttcgacttgagagtcctttgtaaagagacgttattatcgtctatactatagtcaaatcgtagccactactacataggaggaattgtcacgacttcagaaatcccgggtaacatgtcaacagtcttggctttccagcgaggtgccgaggacgtcgcggaagccgaaagggacccctccgaatgggaatgtgacgagctgacaaggtgagtttgatcgtggacccagagcatacgagctacagctgatcctccggatcgtctctagtctacggccgctctatgggctgcttccctgggtcaaggtgccgatctgggatctgtgtgtcagaatggataggttcccggggccttggacacctgggtacctcctactgccgggtctgccgtcgtcccgccaaccgggtgcgtatgctcgttcacttgtcgtccatggcgtcttcgaggtgggacatgagcatgtacttcgagtggtcactcccaccgggtctcgtacgtggaccacacgcggcgatctcggacgaccggttggatcgatatacatcctccacagactgctcgcaggatccttttggtccatttttgtccgaggagacgcgtcccacgaaaccctggactgggtagaagctcatctgaaagatctcggggatggccagaccgagtaccaagggtccacagcatcgttcgacatcaagatgcaggtcgtttcacatccccaccccggcaccatggccattttcggaagcggggcatacgaagaaaggatcctggaggtacagtcacggtcgattgatgtcctgtactcgtacgagttcacgagcgtcccggcgcgccaattcaacccgctcgtgaccgatgaacacatctcgcacgacgttcccgtattctcaggcgcagcagccatcgaacgcctgggcaatctcctcgacgccgaagcgtcatcaaagccggtgcaaacggtcgtcgcgccaatctcatcgtccgatccagcaccggcggcgcaagagtcggtcgacgatagacaagacgaagaggagtcacttttgatcgagcccgcaccgtctcgccaaccggtcacgagattcgaaccaaagaaccagaccgacgaccctctcgacccactcggacgcatggacatgctcgtcctctttcacacacgatcgaccacgccgccactgacgccaacgggacgtggcgtgagctcgtcgttgcctaccggatgttggagattgctgtcaagcaatatcctgacctgacgtggaaagcggtctcccaggcagagatcatgcgtctgatcgaaaaaattggccgcctgccatggcctggattgacccgaaacatgactgacctgatcatcgacgtctggtgtaaaaacgcggatcgaccgggcaagcaacctcgcgtgatcgacctcgccgaaagtctcagggtgctggactggcctcaagccgtcaaggtctttggaaagacccagttcatttgcaatgcaggtcactttttcgagtcgcttcaactcgatcgcaaggacaggatactggtctttgagcgaggtcaagtggccgagatcaagctcagaacgatgcaggttcgccgcgagaacttgaccaacgatagccaccacgtccagatatatgctgccgaggccagccccgagcgatccatgatggaggtctttgccgtcgatcagaatcagaatatgcagcggatgtggacgagtgagctagccgtttcgccccggtctctgcgcttcacgatgctacgctgaatcaaagacgtgcgcatgcagccacacgcgttggcatcccgaagagtcgtcacccgggaactcgccaagatgggcattcacgtttccactcagtcgaccagtgagaccccgaatcagaggcgggaagcgcctcaacctgtcagacagaggaagaggcaaaaggtagaggaacgagaagcacgcgctcgggcagggcctcgaactggatgtatgtacgtgcgaccggactggcatgaccgcagtcggtgactgatccgcgtctccgagccgatatctatgacatttaggcacgcttcggtgtatcggcaagcctggcccgtaatctcgtttgctatcttctacgtttgcccgtatccacatcgtttcattgcgattagacttgatcccccctggagatgaagcgactcggtgttttcggccaatcggcccgaccggtcactttcgccagattaccctggatgcgcgcgcctctgctcacatattcagtcaatctcccgtggctcgggatcagagcgggagaggcgtctctctctgctcccgctcgtagccatacgggggttgtgtgtgaagatcagggcgggcgagcggcgaaacccggctggtcggatatcgtaccgaatcgagcgagggcttcttggcggaacagagccccccggggaagcttcacctcgtgatcgagcgataacaaatggtcgttcgaccacaatataaccatcgtccgagatacaatgtcgatcgatatctaaatgaagggcgtcaaagcacttgagacaatcaatcgagcagcgctctcactcatactcctcctttaacaaactccttcgaggcactttgacaacatggtcgaactcgcttccctgaggatcggccgggtccgatacaattccccgtcgacccagatcgtattgctcggattcgtggtgttttggtgagtctccccccgcagatcgccatggacaaacgctgacgtcttctctgcctctcgcaaacagtacggtgggcatgttcagcgcgtgcgtcgtgtcgtcgttcctcgacagaatcccccacgctgactggatacgttcgcattttcagcgtctccaacttgggagccggaggaactcaagacattgtcatgtccaacattgccaactctacgctctacgcttgctttgctatcggcggtatcggtgccggagcggtcaccaacttgttgggccctcgtcttactctcctgctgggaagctttggatactcgttctacatcggaagtctttggtgtttcaacgtcaaggggaccaagccgttcgtctatgtcgggggtgccgtgcttggattctgcgcagctcttctttggagtgctcgtgagtgtggtcaggcggtcccggtggagtttccggagagctgatcgacgcggcgtctctagagggttgtttgatgatgtcggtaccggctgaaaaggacaagggcaaggcgtttagtgtcttttgggccatcgtgagtaggcgtggcggcgggctcctgctcgacaaccaagctgatacccgtgccagttcaactcgggatccctcatgggcgccctcatcgttctcggaatcaccgctcaagccggtcaagtagccgagatctctaccgggatttacctggcattcttgatcatcatgttggtcggatcggccgccaccatgaccatcttgccactgcacaagattgttcgagatgacggtaccgtcggtgagccctggtcgctcgtgtcaacctcgggtcgcccgctttactgaacagcgtcccatcccgcagtctcggccgctgctcaagcttcgttgaaggaggagctcgtcggcatgtggaaggtcatcaaggactggcgaatgatcaccttgttgcccatgtttttcgcttcaaattacttttacgcttacgtgagtgtgactcgtggtgcatcttggacagacgcagcgacttacccccgcccggtcgctcgcagcaaggagctttgaacgtagccaaattcaacggtcgaacccgagctctcgtagccgtcctcgacggtctcggcgccattctcggagccatctttatcggtttcttgctcgacaaattgccctttggaaggaggaagcgcggtatcattggtgtttcgaccgtctttattctcggtatcgccatctggggaggaggtcttgctttccagctcgaagtgagtggcaacccagggcccacaacctcgaccacgtagctgaatccagctccgtctcgctagtttacgcgggctactccgtctcccaacctggactggtcttccaagggcgccggcggcccgatcatcctgtacatgtcctactactttatggactcggccttccagggacttgcttgtgagttcgagctcgacgtgccccgcaagagttgcactgacgcccgttttattaagactggatcatgggagcgttgtccaatgatccctggaggttggcccggttcgccggtctttacaaggctgttcagtctgccggtggagcgatcagttacgggatggatgccgtcaaggtgagtctggcgttggtttctcgacgaccatggcacgtcgctaatctctgacgaccaccgcgacagaccccctacctgaccgagcacctcgtctcggccttgctcttcatgggatctttgcccctggctatggttgtcatccgcaccattgaagactcgactgctgccatcgagggcgagatcaaggtcgaggacgtgcacgacgatcgactggccgtccccaagggtcatcacactgccggccatctcgacaaccgcgatgacgaggacaagttggggtacgacgaaaaggaagttcccgtctcatacgtcgaagccaagtagacctcacgcattggccgcgatgggcgcgttgtaaccatggaacggcgactagtaagggtgtacaatcgagatacgtgcgtgaatcatcttatttgctaggtcgcccgcaattcggttcggttcggtctatcgcggtcagggcgtgacggcgagtatcggttgcccagtttcgcaaagaatacaatcgaccggtggagagggtctttgacgatcgttctgcgtgacactttgccggtgcgtcacaagtgaatggtcggcaagtctgggttgtttctgtgtgcctagggtggtctgacggcgcccagcggccccgaaccaatcaatcacccgagcgcccgttatttttgggcaagtccacgccggggggacaacgggcaaaattttgccatgcattccccagccacccggctcgattttcggttggtacagaaaaaaaaagggacaactcgcatacgcggatcaagcaagggcaaggtatcgacttggatggaagccagcaacggcggactggtggcaatgagcccgtgcgagcgatccgatgtacagcctgtgggtgggtgaggaaagcaggtcagcaggtgctcaaaggctcgggggacgactgcagcgaaaaactcacttggaagaggaggatctataacgcgactacatcatcgaccggttcggacagaccaggcaaatctacgggccctcaccccgaccgacatcgccaagcgattgcctcgatcgtcgccttttcccgtcattgcggcgcaggtgatctctcttcgaactctgggcaatctcgaaaagaggtcggtgtggggaaggtttcccgttcggttaccacacctagcacctgcgatccgaccatgggccacgccgtgagactgcttacacccggtcgactctctgtcccaccatcgacttgtccccccgcccatcaggacggtaagacgattgccagaccggtcactccctgtagtcatacaaggagtgggtccggtccttgaggcggtcgttcgggggtccgtcacagcggcgcggatggcttatgtccgatacgtcccgcgcggaggcaacccgtacggttttcgaagttctcgctgttacaaccgggtagaacttcaagtgaaggtatactagtttcgcgtggttttctaatcagagctctcaaggcaggaccaatagtaacaaatggccgataatcgttccctagtgatgggatccgagagaatgattatccgtcaatcgttattcgtgctaaatagaaagctgaatcctcgttcgttgcccacaggctaatcgaatcgtgattcgtctttcgtggtatgtccttgtcggtagctgatcgcccaaggtcagaacccctacgaggtgctgcaaatgcctatcgattcgtgttctgtgaatcgatatcaggagtagatgaaggtacttaacgagtagccgtgcactgcgtcgtcggtaggggaaaggcgagggttgaatagtgttccgtggtcttgttgtagcctcttcgtctagcgtatgccaagatccgaatgtaataacgagcttgacttctaaaggaggcaaaacaattgtccaggacgaatctattctactcccctataagtactgcgctcgtttccctctctacactcttgaacgcttcgtctttcgcgaaccgtcttccgtgactcgaatagtcccgtggaaaagtgagatgtgtggtgctgcgacgctcaattcctaggtccccaaatggttctctaggtttcgtttcgcaccccgctccgtgaatcaggtttgtagtttgtccctgtgtctaatgtcggatcgtcctttgggttgaaggatgggtaacgcgatgattgattcttggtgtccttctatccccattgtatcgtctatgtcgttcgttctctgcctaattcgtgattcgtcttctgtctctagttctagtttcccgtttcccgtccttgtcttaggtcgtttcgtcaagcacagacgtccgttcctattcgtctttcggtaaacgtcttgaaccttactgcttggtgcctttcacgttgaagaggtgccggaggccgactgataacgctgtagatgttcggctgccagcaacctaagatggtgttcgccggaaatccctcaagtaggaagttgtagtatgggtaataacagatgatccacataatacatagtgaggacaaaggtagaggaacgataattcggacctctcagatagcacccccgccggaggtggttgggggagagttttccgcacatccccgaatacatctcatgcgtggcgatccgcggataggtcaatccatggctataacagtagaccacatgacgtgtctttttgtttatgcgcgcgcgcgtacgcttgtcgactcgtgttctgagattcgtcattcgtcatacgtgatccgcggtgcaccttctgctgatgacgcgtgaccgttgttgttgttgttttctcgtgttgctgaattgttctgcgacataattcttgattcgtcttcgtgtttcgtctttcgttgtcgctgggaatagtcaggtttgtgacactcgcactatttcgtacctaaagagacgtttgctttgtattttggtagtgttgacgacacttgagcgaggtttaggagctcaagcgttgatatttcatctcttctttactgctaccttacaagagtttaggtcaccctccccaacgtctagcctagtattactactgaacttccagattacgtacgaacgcgtaatcaccctctctcgttcacgtcgcggctagacctcccgtgacactatcgcgagtctggggatgcttcattggaaaaacgtcagcggggagtcattggtcagccagttacgatctgactgatactgcatcagatcaatcgtccagatctcgtctcaacggctctactcaaactaactcgacgagagtgagcggttctctcgcatgatacggttaaaaacactactctatcagaatccggccaggttgtactgttgccccttcgagttttcttcaggggagagccctgcgtgcaacttcaagcatgatcacgccaagaggaatgtggaaatcggcggtcgagcttttgctcagtagaggtttccaaaggctatgtcatatatcaaggaatgctcgggcattttcattctgaatttgatcgacaatttttttcgagactactttgtgaatctcacgatccagccgtgaggtaggtatactaaaggaacatcatcattgtggccattaagatatcagcttcctgagttgtcggttccttcactcaagccctggtggggatgctgcgcctgttgcgcgtgaccgttttggtcagagtcttggtgacagccacctttcggacctgggtctcggtctgtgtagcagcagcctgcgtcaaggtctgcatctcggtcaccgtcgaggctgcggacgacacacagagagctggtgtggtggcagggtcagctgccgtaacagaggcagaagtagcctcggtgacggtggcggaggtatcgatttaattttagccggtgcgacgtatcctgcgactccttggtcgccagacggactgttcttgttcatggcagggatagtgattttggcgatcgtccagaccgaaccgtcttcatttggagtaaagtcggagaaagacgcgtcaccgccagcgccaacagtgctcccatacgacatgatccccgtttctagagcgatcttggtgtcatagtagtagtgggtatcgatcgtcgggtcgcagttgttgtggcattcggttgccgtcccccagctacacaaatgatgagccaaagagtcagttttcgatgcggcaagcgcggagccgtgatgaaaactcatcctcgcatgctaccagataccgagaccaagctggaaatgtattcgcccgtgacctcattagacaccatctgtgtccaatcccattcgtagccattgtccttggctgcgcctcgaatatactcgattctgacacggtcatgtgcgctgaccggtttcatcggaccattcaattgacggggaccaccgtttgcatcgttgccgaatagagaccccatggcacaccattggtcggccgtggcaccgcagtcttcgacttgcaattgggtggagtctagggtgctctgaatgagatctccagtgccgttagacatgccgggccaaatggtgaggaaaccgctctgcttgttgcccgggttacggccgggaacgagcacggtcgaggtgtagatgatgtccgctccagtgggaccggtgtagacggacggaccgaagtagtctcgcttgaagatgtttggtgcagcagaagcgattgctgcacctaggagcatggcggtgaggtggtgagtaggcatgattgttggctagtctggtgaaaggagttgggtagcggtatcgatggagagggtcgtcgtgttttgaagaattaacctttcaactggatggtatcagacgactacatatacgatttatgaaggagcgcatcatcacaatacagtcgccttgtggctgacgtctcgacaacatgacccagagatcgattgtttacgtcgcgcttgctgtgccgcatccggtctggctcgaaggtagttctttgaggcttgacattcatgtgaagccgaagtacaccaccgaacgagagcgccccgcataggtgctggtataatttccagatactttaggcacgaatcggaccaccccttttggccggacctcacaaattgagggaacggagcggcaaactagcgtcaggcaattcattcaattgtatcataaacgtagaaaggctgagagggttgttcctgtggacctgtggacctcacagatctcggaatcggtcggatgttaatcggaccgaacgccttcagggtcgcgcgagatcgcgctcatctgactgataccgagattcgcaggaacaaatcgttccaatgtattcgaggattacaagccatatgtttgtagatctacatgtgtttcgctgcatcgccggcggccatggcatgcgttgtctagctctgaatctagctctcaaatcgatcagactccccaagttgaccttttgtcacggaagaaggcagtctcgctttcatacaggtagcaagtgaagcgctcattaccagccatcttcacgagaatcgaacctcagtgactaccatggcttaagcccattttatcctgtagtcgattcgtgttccaaatgacgcaagtgcaagaccttgagtgcgcctgctgaaacctgccagcgacgagcgattcttggaatcgatagacccccagtccaacgtcggtagcaaaacgcagcgttcgcgtgcctttggcgattgtgtccgggcaggcggcggaagaactggcagctagttcccaagatcgacagatcctacgatcgaagccttccatcgaggctttggtgctgattacatcgcgagacgatagggccggaagagcaacgacttcaaagaggactgaggggcgatctactgaactgcaggcggtccgcgcgatgtcgtaccctcactcgcatccggtcataacataacggttcgaaagaggctggcgatgaacattccggtggcagtagagatggaccgcttgtccatcggattcagctgagccgcctgaaggcttgtcagatcggccccggcattggctttgtcgtgtgcaggcggggcggttcgggttgttcaggagcatactctcgggagccccacggtgaagagaaagtgaggagaattcttgattcgcaagtgtcccgccatgttcgcctgacattcacgcggtggccctgcgagggtccgagagccctggacgtgatgggcgtgttcctgggatcgcaggcctgacgtcgatacagcctccgaataaagtctggcttgactgtctggtcgtgatcctccaggctggtacatccgtgcgaactgacgtggtgtcagcgaaatattcgcctcggtgctgcgatcgtgacaacgacgaccaccgaggtattacctgcacggccgcattagtcgatggccccttcccctcccccccccccaaaagagaaccttaagtattcgccgtcaaacaccaagttcagcgtgtcgtctatgtacgagtatgtcgagtcaggtgtgctattgctcaaagttggtggatacgatatatactctagtatatacaggaacggtaaatccgatttgtatgtacaggaacggtgagttcgacatatatatatatatatatatataggaactccaattctcgtaatgttgacaatcctactgctcttgctgcatccagtacgtcttgcacatgatgatgaaagccgcaaagtcctctccacagtcaggatgttgttccatgtcgagccctccccgaatcaatggcaggcaaatcggctgagcctgtgcaaagactggcccttcatcaatccgctctgtgcactcagtgaccgtgccagacccttccgttcgcctcgagcccatcgagaaccatgtaattgcaagttaagtttgatgtcagagatactcctcttaatttcccgtttgtcggcgccggcgttgaacagatcgttcaccagaccttccatcgagtgtgcttccacttcatcgtccacgtccatctccgtggccttaccaccgacaatggcctcgacggtgggtagggtggagaggaccccttgaacaccgctgacgatggcctcgaccgtgggtggtacggctagactgtccctgacaccgctgatgatggcatcgattgtaggcggtgcggctaggatgtcccttacaccactgacgatcgcgtcaactattgatgccgcggcgaccggtgcagggggagcggcgatgatatcttgtacagcctgcgacacatgacgacgcttctcatcggcccacttgtgctcgagccgttcctgtctcaacccatcgacctagtgggcgacctcgaaccgctcggctttgaggtgcacgatctgctgcctgagctcgtcccgctcttggtctcgcttggcttcgagctgtacgatctgctgcctaagctcttggtcccgctggcttcgaggtgcacgagctgccgcttgagctcgtccagctctttctcggtcgaggcgagttgctgcaccggactcgtgacgattggcgccggtgccgtgggcgccgggttcgtagaggaaagttgggccgttggcgccgggtcggtcagagtagaggtggagctggccgtggccacggtagatctctggcccgacgacactgccatcgtcgaaggatcgagcgcagacgacgacgcgaccggggttcgctggggtagagcgaaaccgttcagagatgcgagaaggttcttcctgaccttgcatcgccgtacgatctttactatcgggaaaggatccttgtacatcgtcttgtcgtaaaagacggacccgccagtcattttacgcgtcaacttaacatcggccgcggctctgtatatgtcttccacgtcctcgatctcggtggcataatgcctgtgcatgggttggtcgtggtgagctcgtctcatagcgagctcggcaggaggaggcattcatgcctcggaatggcgcaattggctggagacgagatatgagaggttcagcgatacttgccggacacgcgtgccactgctcgactcactcttcctctggacaatgcgagatctcgcatacaaggcacctgcgtcccccaaagaccatcctcaaggtctcgaatgcgagctgggggttgccgggaacgatggctacccgcgggatcgtcatccagttgatcagcgtccaatcgacaggggacccggtacccgccattacatgccccgtgtcagtctcccattgacccagtgctgggagtaggcctcttcagcgtcgtctgggaagcagtctgtcgccggagaaaattcgataaagggagacttggtcgtcgaggcgagcgaggtcatttcgagatggaagcccggttcccgaaaagcaactacgtcgacgtgaccgttgacgagatcgtgagctggagagagggaggcttaaatgtattatcccctgtctgaacgacgacgagagtgctttgtgcccatttgcctgaacgacggcggagatcgcccgtcgaacacattggatgtgacgtcaagaaggtcgacacgtcttttcgttcgcaaaggcccgaggtggacgacgtcaaagccctaatccctgcgtatatgtggtgagggcaggtcatgtgtgtgatggtggcgggtcatatatgactaggggcggggtcatacagcggttcaaatatcctggaagacgtcacgattgcggaagcaaatccacttttgacgaaactggccggtggcaagtggaatgtcaaaggtggaaggcagtggcaagtggatgtcggaccgttcgagatgcgaaccggttcgttgcgttcggatcattccatcagaaccgtgttgtgcggggtctctggggcctcgcatcaagcctgcggggtcacaccgaggttgtcgagcgctcttgttataagacggtcgatcgtccaggaagaatctcacagctaggccatcaatggtttggaaatatcgcaagtcaaagtgcgacttacaacgatagcgacaacctctaaacatgaaccagtcccaagaaaaacacgaccttgatctcgatgagaagccttcgactctatacatcgagtgcgcgggcggactcgccagctcggacgaagcggcagaactggaatatccagaggcgctcagaaatatgccgatgccaccttcgatggaaactttgctggcgggattagagtaccagaaaggcagctcggcgtacaccctgctccagcaatgtaagcaggaatggcgggtgatcttggcggcgatgccgtatatcattgcaaagtgagtccgttgccacttctgggccgaggtccaaccacgagcgcaagccgataactgtcctgtcatacccagcatcggttacgggtttgacaatggagtcatgaacatcacgacggccatgcctgcatttttgatcaagtttggcaactgtgagccgcgccggccagtcgagaaagcattcgattggttgacaccggcgatgcttacgatccatagtcaatcccatcaccaagtcgcttagcatcgcttcgacttggatctcgctctggacgtccatgttctctctcggactgttcctggggaccatctcgtgtgcctttactctcgatcgattcggccccagaaaggctgcaatggctgccagtatacttctgatggccggtgtggcggttcaagtgacttcggaaagtcgagagcagctcttgactggcaaggtgagtagcgcggagtcgctggttaaatctaggaagttaatactggacaaacgtcgtcagctgcttgccggtatccctctgggagtgcttcaggtcgccgcttccaattttattgccgaatcggcgccgtctcgtttacgaggaccgcttgcggccacaattggactggccaatatcgttggtatcatcctcggaatcacgactggctcgcaagtcatccagtttgtcaaaagtggtgagtggcgccggatgcagcgcacctcccaggtccttgatgaccgtgccatacttcagactggaagtcctggaagttcaccttggctatgcaatggattgcacctgcgttgacgatcgctatgctgccgttctccacgacctcccccgtgtacctggtcaagcgaggcaaaccgacagaggctgctgctaccctcggcaagctacatggtatccaggacgaagaaatcgttcggcagagactcgccatcattcaatatgccgtcgccaccgagatgcaattgcgaaccagcttgcagccaatgactttcaaggaattgttctccgatcctgtcgaaagaagaagaacatggacgtcgatcgggttgtggttctgctaccaggcgggagggtgagtttatgtattgttgtgcagatggctgtgcgtcgattcactcttgaaactttgctcagcaatacatttaccggtcaaggattgtatttcctgcagcaacagggtctaaaggtcaccatagcaaccaatattagtctcgggtgcttgtcgctcagtgcgcttgccttccttctggccggatatgtgatggacagagtcgggaggcgtgtcttgtttgtctactttcagtgagtagagtcatggcagatatcgtgaatatcgtctgaccgacgcatgccatgtagcatcctgcactttgctttcatgctcactcttggattcctcggctttgcaatgaagagtaatgctgcggctggatgggctgtggctgtattgatcaacctcgccgtgtcgacccagtcgtttggtgagtactaaccggtgggacagcgatatagattggcctcgtgctcaccatcggtttcgtctcgtagcaaccggtggaacggcttatgcgctcaccgccgagatatcctctctccgggcgagagccaagacgcaatcgctctctttgtttacgaacaagcttttgaattttggtctcacctttgcggttccctacatttatcaagaacccggttatctcggagccaagacggcgttgatgtgagttcagtgatgtccgttggagcgaatcttgaaattgagtcgcctggccatcttgatagctttgcggcgactaccgcgctcgccatcgtctggtcctactttatggtccctgagacgtccggccggtcggctattcaaatcgatgccctgtatcacgccggaatcgctcctcgcaagtttgccgacacggacattcgacaagtcctcgagcagcaccagacggctagccggaatgcgtcgactcgggtttgaacgtcgaggtgtttccgtgtatggaagagggtacaggctggggctgcgtattgaaatttatactcttgagacgtgttatcttgtcaggaaatgcaattgtttcgcaaacatgttgacttcgattcgtgaccattttcgtccacgagcaaaggtttccatacgacgtacctctgatctggtgtcgtttcgaaagctagtggaagactgtgctcgttttgaaccagccaaactcctttgacgaaggctggagtgttcagaccggtgcagagacgacagcttttggtcagtcgacagaatgttgccatcgttggaccacctacagggtcttagaaaaggtgaattgggaaccccagctgagagtgatatgcaatctttgcatcgattttagagatacaagatagctacttccgacgccggcaagtacatccagcctccgcctagtagcgattcgtattcctcctgcccagagttatcgccagacgctgcatcgtagttggtgccagcccattcgctaatcacagtgaaacatggtgtcagctgcagtattccaggctgtttggcgacaagcactaacattccttccccgacatcagtatacggcatagtcaatcgcttgattttgatccccccgtggggtaaaccatccagttgaactcgttctgcgggtctctggtcgactgtaccaacgaggaaaggggtcgagttgatgattacgaggcgaacaagcttggcgttctcccagatggcgaaagacgagacgttgggacgattgcaggcgacttcggacactcgactacggcctgtcgatccgatggcttcgttgatgactatggcgccgtagtatgctggcaagacgtggggtcgatcggattttcctgtgccgtcgtcgacacctgcaatcggttgaatcaagttgtagctgtgcgcggtttcggacaatcttcaggtgcaacccatgacgagacgtctcgagcaaatacactcactcgaaaccgacgccatgatggaaatgtaggcgacccagacccaaggaagcgcaatgaagcgcatagtcgaccatccagattgcagcttctccagtgttactgacaccaggtatcccgtgtagaccgtaggtattggtctcgccgaccatgatctcaagactctcctcttcacaccgctgaatgtctcgatggaagcgcgacatcaagagccggatggtcaacttattcatgaggtcgcctttgcttgcctgagaagtaggtcttccagttcgggcgccctgtgacgaagagatgccgtagtcgctgttggcaccattccatcttggactcgataaagtccccactcacgaaatagtgatggacgctgacatttttcaacagacccccatctgctgcgagataaccttgatcaaagatcgcatcgagtgaccattcgcatggcttgattcctgctagagctggtccttgaagtttgggaccgtcaggtgtacccaggtggagtatgtctttcactgcggagacggcttgttgccattgagcgacgtagaccttggggtttgggtaaaagaagtctggctggggacgggatgtgagattggtcagtcttgttcctgtcagatacgtcgggtcgacttgcttcgttaccgatctgaacatactccagtttcacatctttcgtcaggtattttcgtgagcccaggaaagtttccgcctgacgcacgggaagagagtggttggatgagcgcctgctaacatcaagcccgacgccaaacctaccagcaaagccgcctgagccgcagtttccttgacatcgttgtacttgagattgagtccccagatgctatcaatgaggaacgtttgaatgcgccgcttgaaatcgtcgatcgtggcgcaaacctcttacaacctggtgccgttgggtagattgcttgacattgcgtaaaagtccctgccgataccgactacgctggcttcgggaaagggaaccagctcagagacagggccaaagtcggcttcgatgacttggacgtctggacggatcacgccatggtcctggctgttggctgcggaagttaggacgggtcagtcgtttacgctgccactgcgacgcgtcaacctgaaacacgtgtcgcaagctcacctccaaccctgatgcacggcattgatcccgtcttttcgcccagattttgcagcatcttgttgacgtaggtgtttggcttgcctatctgatttcctgcccatacctcccatcggtccatctcgatggaaagaccgatgaggttcggggagagtggctgtgagcgcttgggttccgatgcgggaacgaacacgatggcgtgcgcatcgcgatgcttgatgggcagagggaacaagacaggtcgaacgaacatggcgaggaatggaaaaagtgctgactagatagctcgatggtatagctacacatccatgtatggcatgtatggccatgtgctattgacagcctggattcaagtactctgcgcacgatcgctctttccactttactggaaacatccgacattagcttccgacgtggctcgagctgcggccacttgagagccacgtacggccactttccactttccactctccacttccaccctaccgtgtcggatatggcaggagcactagatgatcgacgcaccctcgacctgatcgattgttgtagatagcatcagacgtgtgtctctcaaacggttcttccacaagtccggccacaagaaacatgagccaccgtgaacgccatcgcaactcgtcatgtccaccccacaacccgcgtccactttaacggatcatgtctgccactgcggcaaggtcttcaaacgaccagagaatctggctaggcatgcaaggaatcgtgagtcggaatcctgccttctcaattgtggtcagggcaagcctctcattcgatgtctcgccgtccataattaaagacgataccgtaagaccatttcgatgcgggttttcaacctgttccaaggcctttactcggtcagacttgctcaatcgacacgcattactgcatgagtctcgagagcgaccggtcacaccatctacattcagtcatgctgtcgacctcacggctgccccggggacaccagcgagcgggacgagtgaagtcgagattgactggcctcctgcacgagtcgaaatagaccctgacttggcgtcaacaagctcgtcccgacagccagaacaaagcaagaggaagattgcagatgaccctctggttttgatagactctacggcatccgatgaccgtggcttcaagagggtaagtcgaacctgcgttgtcctcgggacatcacgacctcttgactaacgaactgtcctgatcgatgacagcggaacttgagggaagattgctctcactcgggttgggatgctcagcaatcagagttacacacgacgattgggttttccccgatagcatacgatcgtgatcctgactttgacaacccccgtctcgacttggccggcggggattttacgatcgatttcgaggatccattgccatggggtgagttgatgggtagatcaggatcgctggaagaatagctgctgaggagtcccgtctgtcctattctttccaccgcagacatcggaatgatgtggttcatggacgagacgctatcttcttacgcaacggacactcaggaagcctcgacgaccgacacgagagatacacagagcgtgtccgggcatccgttggagcaagcgagagacttcgatagccttggtgatcgcagcacacatacgacaaatcacgcaaaagatgcggacaaggggtcaggaagagccgtcacgccgcccatcgatacgagcgacgacgacaagtggcgtaagtaagaacgatcggctggattgcacactacttggctgacattatcgatcgcgtttgactgcagcgaccaactggaatgcaactggaaaggttccattcggagcaggagctcgcataccggcgacctcctttgagcaggattcccgatcaaaggcgtgggaacgtttctggatcaccgatttgcagctggctcgggtgcagcagagcttgggtgggttgccgtcaaaggtggacgaggaggaaggaacgctaatcgcgtgttgacatgacgaatacgggtagaaatcgccatgaaagcaccaggtccggacgtctctggattcattttgccaggatctttggagctcgtcaatcactttatttcccgtacgtggaagaacgaaaacttcagatgctcggcgattgaagtgagcttgtcgtaacccttacagtctactttgaaaagtttgaaccacagatgccgatccttcatctgccaacgtttcggatcatcgatgcagctcctctgctactggccgccatgatctcgcttggggctacgttctccaggcttcctggcgccaagacgttttcgacagaattggtcgaggtcattcgcaagtcgatcaacgtgttgttcgagttggatagttcgaacgtgagcaatcagagtgtgatcttgtgtgccggtccgaaactgatcatggcatgaccttgtagctgcgcagtgacagcttgattcacgtctcgttgttgtcttgcatttcgggaatcttgagcggagctaaaaggacgtttgagcttgccgaggctgccagaggcacgttggtcatcgtgagtacgaggcgggtcgatggacgctcgcttttgcgcagacctgacctgtactcttgccagctttgtcgtcgtgcggatctcctcaactcggcttcgacgatccgacagcttcagcggtgtgacaaccaggacatcgtggtcaggtggcagcgctgggctagagcagagagtcgaaaacgcctgggagcctgtatctctcttctcgactcgatgttccctgcgatgctcgacacacctgcctacatctcgcaaggccagatgaccgggatggtgttgccttgcgatgacctctactggcaggcgccgacagcgaacatgtggatgaattcgttgggagttgcaaccatcccgccatcgcccttctttgcctcggcgtgagtgatagggattacacgatgggggaagacgcagagctgatcgttggtacgcgcctccagactctcatccatcctgacacccgctcgaataccacatggcaaccgccctcaaccgatcccatcactcaatccgtttggtggactgatgcttgttagtgcattgcagcatcatatatttggtgagtgtcatgagcacggcgacggtggccggccacgtgggctgaaccctgcttcggccgccgcgtagaatacggctctcagtctgacttttactactcggtcggagttcaggtcccggtattatcagatgtcgagggcaatcacggagggttcgaaggtcgacgaaaggtgcgagcatgtcaatcaccccagagtttcgcggctgttgtgctaatggtcttttcattaacgtagtggcttcgacagtccctcgagtcatggaggacgtactactacgagggtgacaacgatatgccactggttcaagccggtcgaacgctctactatctgggtcacatttcgcttgccgtcaacgtacgagtgctgtttaccgcagccggaagtgggtcgtcgtggtcctcatgctgtcgtctaagctgaatagctcacctcgatcgggatgatgctctgcagagatgggatgggaacaatctcgtcaatgtcgaccggatcttatggcatgggcagagtcggatcaagcaagtcaggccatcgaccacgcgctagatctcctcgacgttctcgaacacccggctgccaccgatctgagttatctgcctggtgcagcctttatcgcaatcttgacgttgtgggcggctctcaagtttggacgaccgacggcaaccagcgagccttctcgagcgaggcaacgtgatcggctgagcgatcgggggatgctgaatgcgatggcgagtggtctggatcccgtagcgtgtggcaagggtgtgttggagtttggcgtccaatttttggaatcgtcaaaggcttggagatttgggatggcgttggcgttggtgagtcgagtggagtcaccgaagtcaaggccagggttgatgtcgatcggcaatcgcaggtgatcgcaaagcagttggagagggaggacgaggcgttatacaaggggttctcgagttagacaaggatgtggcagaaaattgtatgggagtcgagatcgtgctcgaatagatcgcttacgagttgagggttctcgagccattaagaataaaaaaggggtatgcagcacgagaaggtccatgtctgacagggcggttctcactgctctctgtgtaccgtcgctctggatcacccggtcagagcttaggggctcgatctggtggttattcaactttgatatctcctaccaactcggtcgacactggcgccccatccctcgtcttcgcacccggctttatcgccatatcacctcgcagtgaatccctctttcgggactcttaatcgccctgcacgttgactgcgacaggaacttaccttggaaaaagatgacatcaggtggcccagctagaacaggagtcgatccgtcagtcagggtgcatggcgaggacgatcgatggaatcttgaacttgacttggagtccattcaagggtattagcgcgataggacagtgggttctcgacgcccatgcgatggtagtgttttctttgtgcttgtcccacgcctctccatctctgggtatcctacccttacccggagcctcggtgtttccgcgatatgtatccgcattgccctgccaaacccgctgtctttccgatcgagcgatacttatatgggccggatttatcttgagaatagtgttctggtgtccccttcgtggacgatctacagtaatatctctggaagtatgaccaaaaagcggacaggacttctgggcttagtcgccggtgcggcagcaggtagcgtcgagtcgttcgtaacctatgtacgtaagcgccaccgcgaataccggaaagcttctgacctaacgaggcgcatgggcggtagcgctagagagtacgccaagacgcgggcacaactagccaacaaacaggccggtttcattgctgataccaaagcatcccgctcgttcgagatcatcaagaagactaaccggtcaaatggggtacccggattctatcgtggtgccgttccggtggtctgcggtaacgctctaaaggcggggaccagttctttacgtttgagacgatcaggggccttctcaaagataaagagacgggcaagttgacaccagggaagaacatgctgggtaagctcgttttgctcgagcgcatggggaaccgtttatgaatgcctttgtggtaaacagctggtatcggggctggttgcatcgagtgtattgtcgcagtgactccatctgagagtatcaagtgagtgcccgcctcgcctgtgaaagacggcctcggaagtgtgggctgacgcgatcaaactgaatgaccgaactgtgcaaaacgcgcctgatccagcacaatgccaccagtcttgttagcatgggcaagatgaccaatgtcgatttcatctcgcggatcgtcaggtccgaaggcgcagtggctctatataagggtctactaccgacagtgagtcctccatccgctaagataggcagaccataccaatactgagcgatcccgatcgagcatcatgtgagtgcgaggtgcgagtcggcgtccgagtcggagtctgacgcgcagggggggggttaggggttggctcctcgacgatgacgacgaggagcgattattaatatcttgcaactgatactcactctcatatacttctcttcttttttcctcaataccgcctcttccctggcttgccttgcgttgccttctgatcggccttcgtctgctcgctgcccgctcgcactcgaccctacccacctaggtaccattccacccgaccccccagtgatccctatcgtcgcacctgcctcccgctacatctatctcgtctcttcgtcagccggtgtctctagcgtaccctctcacccgatcggcctctcctctccctctccctctccctcgacctcgatcacgttcatcgatcgatcgctcaaatagcatcctgaatcgacctccccggtagggcatcagggggctagggtcgtccgccccgtcgggatggcactgttgggatcatgatcacgactcagggacgaagagcatgaacagacctcctcgagctctaccttgtctccctgggtctgaatagggtctcgactcctctcatgcggctctcgtctcctctcgtttgataataacgtcgttgtcgtcctaatcgtcttcttgattgggatccaccccgaaacccaagctcaggggaggatactgcgtcgggatctcagtcatacgagacgcagtgccagccgttcgacctcgcctgggtacgagctgaagtcgaagttggacggcggggtgtgggtcggagggtcgatcttgcgccgtcgtcaacatcggcatctggatgcaggttcgctaataagctaagggcgagggccggggctacaataggacggatagaggaccgcgtccgggaaccccaactttcatgctccatcaccaccctcggctcgtcctcatcaacgaccgacaaggtccattcacgaccctgagccctgcctcatccccgctgtcactccattcgaccttacaccaaccttcttcctcaatctgccgggccttccaagatcgtcacgggaggagcagcatccaacgtaggcccatctcaggggactggacggcgggggctgatgctaaggtccgaggcagaaggggagtctaagttcttggaaagtcgggcgtcgtcgtcgtcagcagaggtcgaggtggatgtggtggaattggaagtgctggaagtgcaagtgcaagcgcacacggagatcaaagaaaagctcgagatggaggtggagctgtaggtcagttcgagataagtcgtcgtttcggaacgctgatttatatgctcaaactttcgtctcactcattggcctgatcgtgctacccacttctcgctcaacaatgctctcgctttcgctcgccccgacgtcccaacagtcccttccacacgggacttaggtctttaccatatggaagatcgcatcgggctcaccagagtcgtcctcggacgatgatgacgacgatgatcagggccagggccagagatcgggaacaggacctggacgtacccgaaacccggccctcattccggctgccaagtaggcagtgccatagcccccgcattcgactgaatgggcagacgatccggctcgcttcactcaaagcgggagatcgggaggaggaccacggtgagcgacaccaagggattcttttcccgaccgggttgaacgagtcggatctcggcgagaactgcggactacccaggtcgatgaggggacgacgaggtatccgaagagcaagcaggatgcggatgacaaacgagatggtccggtctcaggttaccgatcgacccgactgcttctcatgggcgagcccttgcgaccacggtatcgagacgggcggccgaccgacttgtttgtcgtgtgacgacatgtccaccatctcgccactcgaatcaatcacacccttatgatcgtcaatatccatcggcccccccagtttgacaggatctcctcgatcgacgtctgcgccacgcccgacttgttcaccgactgcgctgacctgggagaggccgcgcttaattctgggcttgagtatgattttccatcgagcccgcaaccgtgttaggtaacgacagtgaaggggaacgggtcgtcgacccggtcgatccgcagtggggatggcagagggtgcggccgaacgcgatagatcgtgtctcgaggtcgaagtctttcttgagcgaacgtgtgggtcggtccttgctcgtgatcgaccaagaggcgatcatgagttccctccttcctcttttacagcgactgacaccgacctcgtaaccctatcgcccatgacaactcagcacggccgtcatcgaggacgtcgattcaagcaggtcgtctcgttcttgattggctccggctcaggggtgtcatcgattagctgagcggcaagatcaatcacgagggctttgaacctcatcaaagtgctttgcactcttataagccggccagaatccatctttacgaggacgtgaacaacgagacagaggggaaggatgctagacataaagtaagtcgcctcttccgctcactctagtcgatcttgccaaccccgtcagactgatattggtctacaggatgcgttacatcacaggaatccagggattaggagtgaggaccacattcgcacacaagctggactccgacactggtcaaatcgcgtcgacggtttattcctgagatgaagcacactcgagtgacattgaggggtggtctgtgttctgaatgccaagacatgcaattgcttgacgcgctagatcgctttcgattcttttcgggcacaggcgttcgacggcgcaattagacttatggtcctgcgtccggtgagttcaaacggtcgagacgtacggggcgaaggcacacgggcgcgatgtggatggtcgacaaatctgccgcacggtcgcgtcccattcgcgtccaatgcatcttcaccacctagagctgaggggctttcggccaagcgggaaccagaatcaggaccgtgacaagatcactcgttcctcaccttgctccaggtggtccagcaccttttagagcttgattgcgaccatgtggcgtcaaaggtctacaattctccattgtcacacaaccttccgaactttaaccgaacgcgtcgttgtcacgcggggacctttttaaagtttggcttgcggaagctaacggatgtaatttgcatcctcgtgctcctgacccgcttaatacatcccggagatccagagaatcgaccgtagtcttggcaaagggatgtgcttcctaaagaggaacatatcggagactactctaccctctacgtaagagtaacgtgacatgaatacctagtcattcggcatcctatgagtctcagctcagtcgacccgctagcgatgcgtcaacagcgggaacctttttaaagtttggctaaggtgactgactcacgacgaagggggccccagcatccgctaaatccacacccggatcacaacactgcgacgatcgaggacctggtcgataactctggtggaacggctcctaatccctcgacgagggtactgtttccaaaccttgaaacaagcccttgcccgccccggagctgtcgagcaaaaggtttgtgatgatccctgcctgtcggtcgcgtctcgcagccaacgtgcaccgaatctcgtcctcgacagaaggtctatcatggaaccaggttcgactacatatagagcccgtcttgcgaaggacgagcttcattgtcctcgccatgatgctcgtattctatcatcaagcattattcgtcacgttcgttccgacacaccacacgctcatttagcatcatgaggacctccaccgctctctggaagagcattggtctcctcgcctactggctcatcagcagcacacaacaagctcaagcggctaccgtcaccgagggcatcacgtcgtttgatttcgatcaggatgtagataccctgtcgatgacgaccggtaccggcacggtgaacgaaccgccaagggtcaccttgaagccgcacctcccgcccggacatgaacaaggaaggatcaagaatcttcatccggttgacaaggggcatcattattatacgcccgaaggggcgatcttaggtgagtcgggtcgttcatggtatcaaatatatgtattggtacaaggcttggacgctgacgtaaactcatttctcacatcgcagacccggaaatcccttcactctttgctcgtgccaacatcacataccaacgtcccgccgtcgtcctccctcattcctcgctggtacggtacacacgctgcttgatggacgggatcaagatcgggttcgaatccgacatggcatacgattacgtcgagcaacactggcccttgtatctggacgctccccatttgacaccccgtggcaacgcagagggtttcgcccagactttgaaggattccaacaatcagaccggattcctcttgatctcagagtcgctccactgtgatgcctcggagtctggtctccattcgtattggcacgtttccgccctcgagtttgatcacgagaccaagacggtcagcgctaccgccgtcgaggtcggcgtcgatggcgcgtttgacgacgtgagtcggccgtctttgtttcctcgacacttctgcaggtaaggccgaatcactgacgcaatcgtcgggttgtaggtcgcattggtctgggggacgactcatcctgatgacgacgaggacgccttgaaacaaggtcactttagtagcggttcgctcggcccatctttgtccgctggtagcgatgatcgcaaaggcggacccggatcattcgagaagaggcaacaagtggacaaatccaaggcgatcgtcttgccttggtattctaatagtaagtgtaaagttttttgccacctcgccgagctcggactgacccgccgtccacgaccagtcccgcaagccaacctgacgaccgttcagtggaacactgttcagtctgtttcaacccggttcagttcgcgatgatcggccgcttatcactctaacatgctgccgacgcacagagccactccccaatactacatcacccctccctcgggtaccgtctggtcccctgccgacaggttcaccgtgttgaccttgcagagcgtacgttgagccgaggcgtctgtccgggttgccgtcgacactgacgatgagcacgttccgggtcgcagaacaccacatcgaacaccacgggcacgctcgtttacggttatggaggtctctcggccaaccagatccagcctcaacctcactatgccttgacgtcacccagtagagagctcgcgccgggatactcactcccggcgatgcaacctgccagctgtggggtacggctggttacctacgtatacaaggagcctgccaccggtgccacggtcgttcctcgtcccaacacgagagaggcctttgacgtcgtcaagtatgccgctaatgccggtctcggcaaatccatcgcggtcaacatcctcactgtcatgaacgggcccgcagcggccagttgtacatcgcaagtagcaacccgtcagaattccttggtatcattcgcacgctaaccgaacgtcaccatttcatgcagtccggtgacaaccacaccagcaccaccagtgatcacccggaccacgtattccgcgcccatcaccacctcggtcactctcgaaaccaagcccatcgcgaccggttgcgccaatcctccctccaactacaagggtctcttgacttcgaaatgtggagacaacttcgacgtcatgctggacgatcgactggggtactttgactttcagggtgacgcggtcgcggcgttgaaggcgtgggccccgaacctctcgtccggtctcaagaagaggtcgcgccggggacacggagttgggaggatcgcgcgacgtttcaatctgatcgacgctatcgcaggggtgagtcggcagtcaagtctccgctctacttaactaacaagggtcggggaacgaaacagggagtcaaggcaggcgtcaacggtctcgtcgaggtgggaacgtcgatcggcaacaaagtggtggatctggtcaaggaagccgagaagacgtttactgaccgtgagtgaccgtgagatgacaccgtctgtgatcgagctgtagcagacttcgagccgtgtttcgcctacacagtcaaggatgtcgttgtaagtaggatttgccttgttcaagtctgcttgcacgtcgctgacgccgtcgtcgagttcaggtcaatacgttgaaccagcaaatcagtcaatcctttagcgagtaagccgtacctacctgggcagacgtccgaggcaagacgacgttgactccctctctcgtgtcctcagggctttcgactattctctacccctcggtggacccaaactacccgaatggaaaaacaagaacgccttgaccctgtatcaaaacagccaacgcccggcagaggcgatctattgtgtcgagtgagtcggtcgcggtcggccgtgattctcagccaaacccataacccctctctctcagctgcggggtcgacgggaacgcgatcatgtcgggagccattggcttcagggtttgtgagtttggcctcaggaacgagcgaagggctgccccggttgacgacccgtgtacagtacctcccaatctatccgctgccaacgtcaagatcggaggacgcttccacgcgggtatcggactgggcttgactccaaactctacctttaccaaagagatcagtaaacgagtggtaagggttgcggcttggaaggcttagcggtatcgatcgctcactcgtctcgtctcgacgcgcctcaggtgacggtcccggtacccaaggcctatatcaagattgcagacctattcaccggaggacttgtactgacagtgagtcgatgcccgttcgcatgtgtattcacgcaagctgactcgaaacgttcgcaggtcgatgcagtcgccgggctcgagctcaaaacgtcaggacaggtgaccctcggtaagtcccgtcgaattcgccgaggacaagccggcttacctctcgtccgctacaggcatggacctctacgtggacaagtttgatgctaccatcgacttggtgggtggcaaatcgggcgcctcggggttcaaacctcgggtcgagaagcgattcgaagtggacgggcctctgtccctgtcgctatctctggcggcgcctactcagtttgggcttgtccttgaagtccctcgtgagccgtagcttcctgctgcactgacactcgctcgagctcacctagtttccatttcccacgcctagccctcaaatgggcacgcaaggctggtatccgtaacacacccatgatcagggggacagcgatctaccaggaccccagttgcgatgggatcaagtacgacctggacattgaagacaggatcgatgcggaacactttggggaagtcacgaaattggtctctgtcgaactcaacgacatcatttcgggctgttatgtgtaggtcgctcgtgcagctttccgacatccccgctgaatccgagtccacagtcctcctggctgggtcaaaccgaagcccccgacaccctcgtcacccacaacatcgaccggtccgactacgcccacatcaccgacgactccctctggcttgccctcaggcgccggcattaaagtcgcgccatcgagtccaaagacccaacgggagttctacgactgggccttgttccccggcttttcgtttgctggaatgatggtaagcccgatacgggttgtcacaagtatgcaagcacaccgggggctgagacaaccttttcggacagcccacgctcaggggtccgttcactaccatagaagcgtgtgcgcagcgctgtctcgaggagaaaggtgggtgcctctggctgcccctatcgtacacgctcgtctgacacgcgggttcgccttccactaccagacggctgtgtcgcggtcggtcggtacgggacccaatgttcgctttactacacggatcggcccaacggcgccacgttgcaactggctgggtcgactgctgatgcgaccggattgtaccttggatcgtgcgaagaggttcaagccgcccgtcagtcatgatcgaggatcacgattgtgtatattcgctcattcaaatcccacttctagtgccctttgccgtttacgcagatgcacacgcaaagtgccagcgattctatcccaaggtccagacttccccagacagccccgagaacgctggcgagattagcaagtcttgggggttaggggttaggggttagggacctacagcctatacaaggccatcttatcctcgtcttacctcttggccgatctccgaaatttcaacgaaaaggaatgggccgtccgttacccctcattcgcggtccaagaagagccggaatctacggaacgtcaaggtcagtttattggcgctttccttacccagtctcgtgacggtgctcatcgcgttcggttgcctcacgatcagtaccaggggcgcaggcgggtagaccgagggttaatcggacgatgaccatgtcgttcgccgatgatcccgtcagtgtacgggaggtgaccttgacgactcctggtcagggcgatcagatcaccgagacgaacgagccgtgcgaggcagggacgtcgagcaaggtcgtcacccggaaatcactcaagaggagcgtgacgtttgctcctaccgcgttggacaatccggcgacggacgagttgaccgacttttcgatcctccgtctggacctctcgttgggccacggtcagacctcgacaatgacccgagcgggaacgatcatgtcctccctcgaacgaagttccatctcgcgattattgtcatctcgactggagtcctcattgtcccacctgaagaacctcgaaggtagggtcatgtcgaccaacagtcgggtcctcgtcacaggcgatctgaacgccgggaaatcgacctttgtcaacgcactcctccgacgtgggggtgtcgacgaggaaggctggcccactggcgtcctccccgtggaccaacaaccgttgacgggtaggttcatcgaagtgtttggcgaccagttcctcggcggcgatggggatcatcgcgagcgggtgcatatcgtcaagggcaaggaggcggattacgatcccgaagacgagttgacgtacgaggagagaaagttgcaagatctcatcgatctcgtcgccgaacaggaagccgaggcgcctcctctcaagatctacctcagggctcccaatcagaacattgccaaccctagcatcctgcacaacgggatcctcgacattagcttgatcgacgcgcccggattgaatagggacgtgatcgcgaccacgtccaactttacccgaaaccccaccatcgacgtcatcatctttgtcgtctccgcctttaaccactttacgctcagcgccaaggaatttatcctcagtgcgggccaggaaaaggcgagaatgttcatcgtcgtcaaccgattcgacgaggtccgtgacaaggaaaagtgtaaacgcgtcgtactggagcaaattcgacagctcagcccaaagacgtgggaagagagggacgaactcgtgcactttgtcgacagcgcacaggttgccctgcgttgttcggaaggcgtggacgaggatgacgaaaaggctaccgagctggacgccgcgttcaggaaactcgagtcgagcttgcgaagctttgtcctggtcaacagggccaagagcaagctcggacccgccgagaactatctttgtcatttgttggcagacgtaggactgctggccagcgccaattcgatcgtggctgaagaagctagggacaaggctaggcaggagatggacagggtcaggcctgggcttgaagccatgctcaaggggagcgtaggcctggaggaagcgctgggagaggaagaagaggccgtcggtggatcggtcgcttcagtcgtcagggacaaactgacagaagctatggccgctgtcggtagcgggcagaccgcagtgggcactcacgtgtctcttcctccttaccccggtttcctcggcgtgtgggactacgccatcgaggtgcgaaaagccctgttaaggagcgtcgaggcgactgtcgtccagcttgaagacgaaacccggaagatcacttcgaacagcatcggcacagtcagcgaactcggcgaccgtcacttgccaagcgatgtcgagcgatccaagcggatcttcaaccctcaggcaatgtttgccggaaacggggcctcgagcggcagcaagactatgctcaagaggagcacgtcccagatcaatgccgtcggtctcaatctcgtcggtagatcagaactcgccaccgtctcgctggccgatgttttcgacttgaaccattacgtcctggcggccaagtctacacttactggtggaaagacctcggacgacgggagcaacggggagcttaccattctcggcgccgcctcggtcgcggccggtgctgttggcatctttggcggcaaagcgctaggccttcgtcacgcgctcgaatcagtcgtttcggtcagcgagatcctcggcgatcaggcagctaggcgttgggcgggccctgtggcaggcgctgtcatccttggtctcgcctggtatgttgtgcaggatttgccaaccgcgatcccccgaaacgtcggacgacacatccaggccgtgctagagtcgaaccaggctgccatgctcctgggtgacactggcaacaacaactataccgacatgcaatcggcacgactgcaacgcgaggccagaaaggtcgttcgattggcctcgtgggatctcagagagcgattccgtgcggctctcgaggagaagaacaagatcgtcaagcagagcgaagaggatgaaaagcacgccgctcaagccctcgaatactttaccgatgtccacgcacgtgttgacgatatcaagaaagatatgggggagagcgtcttggcctgaacagctgtcaatggtttaggccgtattccaatcctggaattgccgtggtgtagacaggcagaattgccgagtgtgtagtagtaaccgcgtgtatcgtgattgtatcgcaaaccccagtcgtaacagcccataataagtgccaaccatatctcatatacaactcgaaacgtcccgtttttgtacatcgtgtgacattgtgtttcattggatcgttgctattgtggtcgtcgtgatcgatttcgttgcccagtcgtttcgtcactgctgtaattcgagcagattgtcgtaaattttcaaaagtctaacagcatggagaaatggcacacatgagcgtttaattcgccgcagccaagtgcggagaaacctcgactgacagattcattcctggttctaaaaattggatgatgatgtggtgcgtaacatgcgggctctcggcgaagtatttgtcggcatatcggccgaaaagttcttgagcagtgtcgcccaaaatgctcatctgaggagtcctcgctcgcacgttccccggtaccatggtcagaccgcaagtatctccgtcctcatggttgagaggcttgtcttcttcgggatgcagggcctgcctcctagcccatagctgcttgaacgtttccagaatatcccaaatttccttgtagacgccgagctgaaagtccacctccaacctcgcatcgccgtagtcgagtgcgaaatcgtgctgcagtgtcttggcggcaacgttttctaccgactccatcgtgatagtctaccgtgcgaaaaggtagagagcatgaatcagtatgtcgatacgcacacagacattgaagcatcacgactcaccgtagttggtagcgtaatgaccttcatagacttcgaagccttgctaacccggcgatgccattcaggcagagatagtggctctttgccttgaagatacaacgggggcttgacgacatggcggtggaactggatcccttccaagacggccttcaagatgcgcagaggatccccattgaaaccggattctcgttgcacggttgtcgaaaggctttcgaagcgtagtcgatacagctcagtttccgagagcgaagacatgtagattccaatacgagtcctgttggcgcgcaaagtcatgactcggacaatcttgatgttcacacggcagtcgttcaaagccttgccctgagccgatttctgcatcgttgctgctactgccgcaaaggcatcgtcgggcttgtcctcgaggtatttgcggtacgccagtgactcagattttgcgttgtcaacttgatgttgccacgtgctctcaaccctctcaaacgattcaaagacagctggtaacgccaagatcgctgcgaagccgtcaacattgcccacattgactttgaacgagagattgaggctcgcgtccggggttattccccgctcgtccatgtcagaccaatcatcgtgtagagacatggtcgtgggggcaaatctgcagaagaatcgaatgtaaaaatcagaacaagcattttgtcgtattggatggagcttactgtaggtaggcaaacggttgactctcgtgctggatttctgctttgaacattccggtctcgatgcttagatgcaagagtgcggctctctgtgcgatcaagtcccgaggatagcgcttggcgacgagagcgactctatctccatgtatgtttccggcaatgaccccgtttgcagcaatctggagctggccgatctccccttctatccgttcctctttcgccgtcttgacccatcgcacagtgactggtgataccgtgaagcagagctggctgatgttgatatcggctttgagctcgaggcggcggaccctgagtaagatcagatgcctgaccacggaagctttcaccggggacggcgcgcatatgctggcgaccggtccgacacggttcaaatcctctttttgtgcagaagagttgtttgacgagacaggtgcgaggctgtcgacccagactgctttgaagcagaggagatcttgtattcgtgccaatttcatttctgccgacatctctgtctcgattactgcgctgatcgtagattctcttgccgacaattccttctcccaggttaaggatccggtcatgttggtgactcggccggcgatgcactcctggtctttaagccattcatggcgtatatcgaaagatactccgcttaccgcaatagtggcgactagccgacgtcgagatgggcagtattgtgcggtgatacccccactttgccatgctagaccggcgaggaccggcgaatccggcatacaggtcaaccgcattcgagattggtcgatgcgcagcgcaaactcccaacgtatgtctggcagcctatcctccaaaggaagcgacggctctgttgccgtagtcatgtccattttagcagcaggacgatgggtccggtcgacaggaggatccttgataagctctctgcgcgaagaatgttcgctgagagctttccggatctcgtcgatgaagcgcaatatcgagggtttgagcaaattctcacttgcatgaacgacctgttcgtgtgatatttgggtcaatgtccctttagtcaagactgaacagaaacgattggtaacttacgaggaaaacctggacagtcttgttgtgtctagtgttagcattcggttgacgtcgcaaatcttccccacgcagccagagagatattccgggtagtttgatgttatccgcggctgaagcatggctgcctcgtcgtcgatcgcgtacaggactcgcatcgagcggatcacttgtctggtataggatgacggaaccgctgaaaaaattgaacgcaaattgcagatcaaaaggccagtgggcctgcttgcgatgcagttcttggttttcaatctgagatggtcctggcttagccgcatcgagagggtattcttgggcgagctgctcgatctgaagcctccccgcctcgtagacgctctgcagcatgaaggcgtacttgacgatgtctggatctaggcgaagctcgaaacccctgaaggtgctgtttgcaagaacaagcctgcttttccccttctccattcgcacttccatcagagtatggggcaggtgcattctgtttctggtcgagtgttgcagcccgtcgtactgagtcacgtcggaagtgtcaaagctatcgatcacaacgattagattcgtaaccctggaatccaaatttctgtctgaacttacctgttgacgaactgtaagagcacatcattgacttcgacctttccggaatctcccttctgattggaaatctccaccgcagcgacagtgaacagtaatgcagaggacctcttggcgagtaatttggtggcggagttcagtgtaaggggtatggctagagccagtccagtaaggcggacattgattatgcgcttcatcatgaaccaatcatctgccagctcgggtgactgtatcgaggactctgccttcattagctgctcggtcttgttgacgactttctcccattcctctttgcggcgggcgcgtacagcccgcaagtctgtcgtccaactgcccaatatgtcataaatctcgctcaacgcagagacttgcacagtcgcatgaacatctgctagcagcacgctgattgtggtcggattggcgactgagcttccagagtcgctttgtacctcttcttcaggctcttgagtgacgtccaagctgaattgcatacaggcagattgattgtcgaaggtttctgggctgagtcctttgtgcgcgagttggtgaccaagtgatagcgaaagcgaggtcacgtttgcattccactttaggtcggtagatgtattgacactcgcaatgttcccacttattgcaccagtctggatcgtcaaggtggacagaacttgcgccgcttgcagggaaacgcatatacctcgacttcgaacgctgacggcgtagctcaaagagcgtggcgagcccgtatccttcccaggaattggtgcagacttgctcgaaataccctgtagagaatggccgatcgaactcaacgcttgtaaatcttgttcggctgctttgtagactgatagaagtttctcaaggacggatggtttgaaggttccgacgaagcggtcaatgtcgatatcacccgtgaccgaaagatcgctcgttgtcatgaggagtcctccgcgagctctaagagcaggcagcctcatcattacgtccggcatattcagctttgaggaggaattttccgcctctgaagctttgcaaaagccgatagactgcgagccgagctgtaacatgctttcaatcttctgcgccgattcttcacgataaacctggctgcctcgcgagatctgaaccgtagattgttcgcaggtccagaacgccatgacggtatccgaagcttggagtcgtgccctaaatttgttaatgctgagaatcatttcggccggagtcgagcctgccgcaacaggaacggaactggattttacatgagcggtgtcaggggggaagcgaagccgcagcttctgggcaacgtgctctaactcgctgcaagatggaacactacgtctcagctatcgttgcttcagatgcgggaagcgatgataaacctacgagaaccggctacttttccagttttggatcacctcttcagtatggcgagggtcgtagcctgtctctaagctgatagattgaatgaggatggacgccgacggcctcgacatcgaagccttgcctggcattctgaggtttgggaatatcgccgcctgcccgtcctccacagtaagtgaaaacaagcggggtagtcctgatttcccctgtcctcctgagccattcatatgcagaaccgccatggttgacctgtgcacaacgagattcacggcgtctctggcagcgcgagttctttcagagtcgtcttgtgggccattattgctacacatgctgtagacgacatgagttccgtgtgtgtcgaaagcaaattgtagtggttcggcgttgatgcggagacctatcttgtcaatgccgagaatgaagcaacgtcgcagatcaggaaccggtcggggcggaatttggctggatcgccgaggagtcgtcatgcccttttcaaacgtcttctcgtaagcatcgtatatcggcaatacgtattgcgcgatatctacgtgcacgccagcatcgaacgttgcagcggctagagtgactgtttggacccgcacagctcgatcggtggtttgtgcattccagatggagcaagcaagaccagccgcgcttatgatccccaattgttgaccttccagagcggtgacgtcgaagagtgacgcgcgcatcagttgaatcgacatgttgaccttcctgtcgttgatcgagtaggaatcgaatgcgatatcctccctggtaagctgagattgtttgacttggcgggaagtctgcagacagtgtaagtcgatccagtcatattgaggaacatcccattcccgccagtcggcaaaatgactataaatggcggcctgaaggtcctcaggagtgaggtcgagagtactcgacccttcgttaagaccgagagtgtctggagtctccacatgccgcgcgtagtgccgcaattgactgagaatacgccaaccgatgtcctccctgagggtcaagatcgagactggagcgacgtgatcgaccgccagagtgtcaggcggtctcaatagtggtccggtctgtcctaagaaggccggctccgaagtaatgccttgccgctcagcggcttgcacaatatgccaagtatagtccaggtggtcggctcggtcaatccctggatcaatagtcgaaggcgatagattggctagtgcggaatcccagcggtgagcgaccgagagcacagccggtgtgacatttgtggccatgacgaagttcagtatttcgaaatcggccgatatgctattgccgcgctgcgaatcagacaactgtattttcgaaggcccgcaatttgcctcaaatagaacgcttttatcgatcgcgatctctttcgacacgccttgagaagtcgaattctgcacgtctacattgaggatcaagccgttccaagatatttccgttgtagtggcaacgtcgactgtcgcgctattcagcgtatcgcgaaccacagatttccccaaagatggcctgattatctgtacttcggtgacaatgacatcgaagtcggatccctcgtgcgcttttaggccaaggagaggcgagtgccggtcgctagcgctggcactgaaaatcgttaagaccggcgtagacaccgtgagcatagaagagctgttggtaggaggaacatgtcgtgccttcaaccatgaccagcgttcgaccaaagctttgtcgagccatcgctcgtagtcgcttgcattcgaaagatctgacggtgtctcgaaagcgtctttgaaagccgccaggacttctagtgcctccgaagtaatgaacagatcgacccgttcagggaaagtcacatttgtcaccgagtaggaccggtcttgagagttttggtcggatactgtcggcgtcgtcgttctcgccttcccgtggacatggcttgggtcggtcttggcagaggctccaagagagccgatagcaggacctttcgtctttacgaaggcgcgttcgccgacttcctcattgtgttcgtacactgtcgataccttagccaggcagcgttcgtactctaggagacacttctgtgagttcagctgatacgagcaaaagctacctgggcacataccagaaagttccgatgatgtgttgtgatgcgatgccgctcgcttttgacggtacgatgacactgaatcttccgatgaggccgcttgacatggtgcggcggcaagtcttgcgttcgatttcgcgatgaaagcgccgccaaagtgacttctgtaaaaacaggatgtcaatctcacaggttggaactgattcaacgagactctgtagcctcaccgtgaagctacgcctgtggcggtggaactggtgtcagaagttgtagcagactcattctcccagctatccgctgaagacgacgaatcgtcctcgtctggtgagaacggccgaggcaagaatagaggtcccacatggtatgatccatcgtcttgcgaagtcatgctgtacatgggggccactcgtcgtgtggcggagtcctgttgccgtaggaatgactgttgcgagacggcctgttcttgccatccgagtggaatcttgaatgaatcgagggcgaccccgaaagtcgctccggctaagcgatagaacttcggcttgccattgccgtgtgcttgtctctgaaggagtgacagctcgacttcgtcgatgttcaggctctgcatcgaagagtattgcagagacgcgcggtcgtttgtatcgaacacgagcctctccaagcgaacattgattgcgtcggttgcagcccatacagtgacatccactaacggagctgtaaccttgaagatggtgactggaggatttgggcagaggaaatctcagagatgacgatctagacaaaaccgtgatctcgcttacgtaccgtctcgatcaagaggaggattgtacagtggcaggggagcgttatcatgatcgcccattccaaggttgaaatttgatatgccagtctgtatgctttcgataagtttagcttcgcaattgccgccgagctgcggaacgtggaagtcccaaaggcagaggtatgttggggtcttcggaggaagaccgaataggcgatctgctcggatggataaacctatcattgcacacaaatgagaactgtcaatcaccaaaaggtcaaggattcatccgatcaactcaccccccagatacaggtacttgtcatcttttggggctacagtgctgtatctttcaaagcacgatgtagagtccagactgtggaaaatagttgttggtcgagcgttgaccacaagctctgtcgagggtggttcaattaggagcttcgccaggaatgccgtagcatagctcacccataaaggcttcgtgcgaacgtagatgcacttccagcttgggcacgggtaccacggttgcctccacgcaatcatatagctcccgcggcagcaacgcagtgccattcgtaatctcgagctcgagattgacttcaaaaatatccgactagcagtagaggtagagatcttgtcagtaagtcacacaatgaagacagggttgctgtcatctgataccttgcctggacggtagcgctccagagttttgtctccccaactacggggcgttttggcaaactcgttgtgaaagtcttgcgttgtttggaagttcataaaagatccggcgtagttgtccttgacgagcatcaagcgtcggatcgcccatccgattatcctgaatgctacgttgtcaagctgcgtgaaacctcatcagcgtcctttctcctccttcttcgcttctccgactcacatatatgaacagcgtcagacattcaacgtgttcgggagtgggctccgcatagtacagataggaccccctcaatcgtaatttgccgacttttccaatttgagtagtgttcgaggaaccgaaggtactttgcgtatgccatccaggcatgtgcatcaggagagcaaggtccgaaccttgcacactgaaaggtatggttgaggattccggtcggaacctaatcaacggcacttcgacttcggcatatgttcgcacgccttgaatctccagtagacctgctctcacgttgacatcggcgactcatcatcgttggcaagtcaggtaaagtcacttacagtttgcttcgttcttatttggggaatccacaatattgaagtcattcacataaagtttgactgtgtagtcggtaagggtgattcgaaactggtagtcacaaggaatgaagtggtggaagtcgccggtagcgccagagctccagtctttagcaaggtcggtcatcaaggtgacatggtcgcgaagcagagatatctttggctcttgcaggtcaatgtcaaacgtccaatcgcggcgcgcgtcccactgtaggggagttggcatcgacgcccggacctgtggcgaaaggggtgtatacctgagttgctatctcgatagcttcgcatttctccgattagctcaccttgaccaactgagtgcgcataaaattcgcatagttgatgcttgaggacacactgaagccatgaaactccatctccatcagggcgtcaaaacctgcctgtgatgctaccaatggcatgacgtatcgaatagtcgattttggaccgacatcgatgtccatccaaccgtatttacgctgctggttctttggcctggtaccatgcttgtcataatcccagtcctgtccatgagcaagggttactgattgagcatactacgtaatgatcgaaacggatttcacggatataccttgctgctctctcgtgtcggtacacgtatagtggtatgcccgtttagctcgatatgcaccctcatctctgtatgcatcctgtagtctccaggcttgagcttatcggtcttggtagactggtagaagatggctggcgtaaaggcttttgtgaaagcgtcgctgttgtgggctgtcgttaaggactctggccgggcgcttccttctcgaattcagactgaccgttgcctatcatgccagggaccatagatcattctcatctcgtgcacaacgaattccaagccccattctggaggtagatctccgttgccaacgtcgtagatctgaggatgagcggctttgcttgccttggatgtagggtctgtatggtcgtccgggttggggacgatacctataggtttcacgaggtgtgtcagacggtttgtacggtgctcaaggtagctctcagagcagaatcacctgcaacatcagaatagtagaccatatcgactttacgagcctccaacacagtcgtcactttggcatactcgagttgtggatcggacggcccaacgtctgcttcgatatcgtttcgatatcgtgcgagacctttccattccttatctgtaccataatacgcggatgcatatgtcggtggtttggcaaagaactggttggacaaccactcgaattcctcagccaagtgcataaagtccgttcgacgcaagaaggtgtgctgcatctgctcgagtattgagggtctacgatacggtccgacatgttggtcagatctcgggcgccgtgaagcacaggaacttgctcacttgttttttgtcaactcttcgtaggcccgtcgaccatgatcaagcaaagcaccggtataatcgggattggtcctgacaataactttcacgccggtgaagctaaaagaagcgacactcttgaatacgtccaatatgcttcgactctgtccagcccggtcgcaaatatcgtcagaacgcgtaggtggaagaagatggacaggggcgacgtacctcagtagtctccagcgatccgtgacccttcttgaattcggcaatggttacaatcggtgtcgcgtcgttacccagcaccaccgcacccgtggcgatctcgacatccacaggcaggaagtcacgctgccattgccatggttcttggtgctttttggtggtccatttactgaggcggcctctcatgatcccaacgtttggtatgggcggagagagaggtctggccaatcgctctaccatgccaaaccgatatcacatcagcgttagccttggcgactcaagaagtctatatttacctgggggtctctgttccgcctggtcgatcttctctaggagatcgtctgtaccgttctcagaccggggctctcctgtagccacgtcctcgtccgaggaagaagcatcttgctgcttgttatcctgcgggactttgccttcgttcgcagccttcatcctgtcgacaatcgcgtcaaaggccggggatcgattatagaggaaccattcgagaccttccagatgaaccaagcatcgagacgacagacggtctggtaaaaaagattcaatatgtgtatctgctcgccttgcgaatctctgagccacgtaccggatgtgccttcctttcgaacgtgccatttccaaaatcgccaagtgatatgaccctgaagaatccgcgctgacatgttggtagaatggtatcgaacatccttaaacagtatacgaccggctaatggggagatctgaagcgagactacggaatgagacgagcacgttagtcgacgagaaacgccagaacgtattaagggccggtctgcttaccgatggtaacatggactttcgaactcttccacatgaacagcctgatcgcaaaccccactacaattccaagtagacggttccaaaaaaagaagatctgtcgacatccgtacaagcgtcaggcagggcgtgctgattcggtgctatgcagccggagacgcaccgcgattgcgacgaagaagatggcgatggcttcgacgaggaacagctacatcagagggagagtaagaaggttcagcctttcgctgactgtgcttctcagcagcgacgactcacgatattcagttggctggaattcgaatcgcccaggatttgtgctgccgcaacttgaaaacaacaggtccatgttgcaagcagcaccggaagcgttccgtactgggtaagcatgacttccctctcccaattgtagtttctttaagcctagcggctgatgttcatgtcttcctggtctttccggtgttgtccatgcgaaaatcaaggccaacccgcttcagtcgaatggtatattgtcgatcggtacttgaagctcgttctcgcaactatcaattctcgatttgaaatacgggtaacaaggagtgcaggttcactccaatatcggtattatattatggctaagaccgctagcttgtctggatcgcaggtattttgattgtaagaccatcttgaggtgttcttgaggacggagacgcaatcgccagacatgtccgggtgatggccgacgacctccacttttgtcggacggatcattaggtcgtcacgggttgctccgactgtgtcgatcgtattcacttgcatgtagcctctattcaggaggctcagcaaggatacggtggtggggagcttgaattatagcctggtctgatcctctgaagaatccagttaaggttttgaaaatgctaggtaagtgcgggcacagccgatcacatgccacatatcgcctgatctgcatcacttgtctccgcacagttatcggtttaacaggcgggattgcctcaggtgagtagacttcgtcacaaggactcttcaccgtcaggcctgatgaaaaaaagtgtgcctcaggcaaatccaccgtttcctcatacctacacaacacgcatggcttgcccatcatcgatgccgactatctcgctcgagcggtgattgagccagggactgcaggatatcaggcaatcgtcgaccactttggcaagcgggtcctgcaggacgacggggtgcagctcgatcgcaaagcaatcagcgatatcgtcttcaataacgagaaggagagaaaggtcctcaatgggatcgtccatccggccgtgcgtaaagcgatggcatgggaggtgacgcgatgctggatgcaaggtcactgggcgtgcatcctggatgtgccgcttttgatcgaggcaggactctacaaatgggtcggagagatcattgtagtctacgtgtgagtccacagagccatgatggccctcaagtcgttcccgctaatctatggcatgttacgctatccagcaacgagtctcttcagcttgcccgtctacaagatcggccttctccaaaccccaacgaatcacgcttgacctcttcgcaagctcaagcacggatacgaagtcagatgcccctctccgacaagctgaaatatgccgattacgtggtcgacaattcgggtaccaaaccggaactcgagaagcaattggacgtttgggtcaacaagatcaagggtcgaagcgctggttggaagaagacagtatactggctggtacctcctatcggcctatggggcgcgttggtgacgttggcagccagaacatggaagcgatatcgagcaaagttgtaagatgatacagctcgcgcttctatcccgaggcggaaatacctgtcatgccgacccgtgtaagaccagaaaacagatctggtatgctctgcgtcttaggtgcgacagtgaatctataagaatatttcaggtcgcattgtggacagttgcaagtttcgagcagggatctcggcaaatgggatgtcaatatcccgcgagatgctatcttgtcagtgagagcatggaatgtacactgcatgtgggcgatttatgggactgcgaggcgtcgtagcagatcgcttcggagccccagagacttgtagtagcttgttcgtctagaattcttcggctatcttgtcctccggccctaaaatgcgaaacatttccgagttcagcccctgccttctgtgccaggctgatcggtgcagaacttacgagtactggtccatagcctgtcttgctgcctcacgatgtgccattgaagcccacaccagacaaccataccgatagcagcgaatggtacggctctttgaaagaaaattgaagcggcatcggttgacctgtgtgtacggtccccagcaaaatgccagcacggttcttaccttgctagtttcgattccgcgccatcgatgatgtctacgtatgcgaggtctatcagagccaaggcggtcgtatataaagcaccagcgagggcaggaatcacagggatccgaataccagctatcttttgcgctctttgtcgttcactcatcttccaataaggactgcgtgtgcaagctccgatttccactacggacgatatcaagggtgcggctggcattcgttgtgagcgaacaatttcctaggcactgctcgcgaatccagcctcacccaacacatgcaagaccatgacaaatccaaggtacctcgcggactccggaacggcttggcctcccaattgagacgacgtcatgtaagcgaagtagggggtcgcaaagcatctttaaatcgcgcacccgtaagtcgtgctgtgcaaggtcgacaagtcaagatgaaatgactcactcggtttcggataagcaagtctttcccgcagcgaccgagataatgtttccgtctgacgcttttatgacgataaacggcaatttattggtgaagaccgacaagagaactgaggccagaaccagccaagagcaacaggcggtgatctttttggctcctgcccagatacgatgttgcgcgtagacttctccgtatcccggttgccacctgtcctccttccacaactcggacctccacgccgtgtagacgcgcgcaagccttgtcaggatggagccccgagggaagggcgccttgcaatcagatttatcgattgcgctttcagagtctgatttgcccataattatgtgtgtcgctcgcgggtgtatttgcggaaggggtaatcattgaatcccatcgactgatatggaggcccctgctggtcattaacaagagaatgtgcgatttatgatgtggtcgagtaggcttgaaacacgaacaaggggaaacaaaggaagtattggacgacagcgaaacacttttgccgcttaaccatccgcgtttcggaactccggcggcacccagtcgagcatgagtaagcggaagatatcccgttcggtcttggcatagagttcttctcccgtctgccgaacgtgtagactgccagagtcaaactttaaccctctgtgtaggaaaggatagatatatgaggaagcgcgtagggtcaacgataggtacctcctgtttacatacagcgcgtcttccgcgtgacgtctggattgcccccggtataagcggtgcgctgttccactacaacgaatcgttccacgagacgtaccgaagatcacgctcgaagatcatgctccccgaccagcccaaaactgcaagagagtatcgatggtgaggtgcgacgatcagatcgactctacgatgtatacgttgtccgtgagaagagtttgtgggcaacttgaaaataacaaacgctttatcaagaccatcgaaattgttgcctctggcattgttatgggtttgtctctccaaatcgactgccatagtcaactctacgatttgagacaagtgtcagcgaccaagcgattgagaatgatttggcgaaaacctacgaagaacgtgagtaattatacctgcaggacagaaacatgtgagggcgagtccttgattacggaatgttccgagcgccacggccacgaacctgcggatgtcatgcggtcgcgcaggctttttaaaagtccgttatctagaccgggagccggtgggcagatgatcaggtcgatatcccctgactccagctttccccgccggtatccccccgtcaatgtgcaatgacatccaggaagaatggcatccaggtgagtctgaacgcaattggcaatttcttgtacttctgctcttggaatgctaaactgacagcgcgttgtgacttcagcgcgtcacctcgctaggtatcgagtcgggatgatgccacgacttgccgttgatccaattcttcctgtaatagcatccactccctacagatttcggccttggacatcaatcctccctggcgtctccgaacggcgtcgcgagtcttgcgcttccaacggtaagccccgccccccccgcccaagacaccatcaggaccgtaccggatctttcgtttggccaggggaacaccctcgcccactactccggaatcccactcttgcccttccttgtctgcataaaagtcggcaacgtcggacaatgaccgacagccgtgcagatcgtaaagttcaacggcggtactggtgccgatagtgaagactgaagcgaattccctcaatgtctggaaacgcgagtctgcaagaatgctatcggattcttcgatgcgaccggtctctagatattcggtgatcttgatagaggcagaagtctcagcgatgacgcatagtatgcagaactgcacacgactgactctgtctgcgaccttgcttccgcatccggacagcttcagcgcctcggagcccgatgtgagtcgccttggtaccgctgaaaggtcacataggtcgactagcttagtgatacgatagtcttcgacagctacgctcttgaaattacctttcaatatctgccaaattcatgtcatgatgatattagacaaggaccacagaagtacaaacggtcgacttgcactcatgctcctcttgtaactcagtgtgttggcattcttttccgctggagcgtcaaactccctcttaaggtaaattggcctgatggcattgatctgcgaatataattgaatcgaccttaccgctcggggacagtcgagagatctgagaacgtacgatgtcgtcattgacgcagatcaaaggtgagcatcgttgaatactcagactaggtatttcttccaaatcaatgttgaaggggagcggtcgtaaggtgcgtacaccatcgacgatttctggctcttccatttcttgttctgtctttgacatcgagagcacttggtgatcttgcttggggtgatctacatgcatcttcgcagccttgccgatacgcttgtattccttgttcgaactgtccgtaaatatagggctgggttccatctcatttttcgtgcttggagagagatcccgatctcgctccagcttcaagctgcgatcctcctggcggtgatcacctctagcctggagatgagcaaggtacccaggtatatccggcaccaagtcagaacggtgggcaccgaaacccctcgtcagatctcggactgatgctgatcgcgtagattcccggtcaccgctcgtctccattttgatcttctttccgacttttgtatcttcttctcggtcatcgcctatttgccgctttctcttggctgtcaagtatcgtgcatcatcgaggtgaagagtctcctttaagcatactgccacatctgaagcttcacagacggccaggttgtcccgattgcgaatcctgtccagaacggtcaaggaagtgtttggaatgcggaagggctgacggtctggtaagcctggtagagggaacgccgaaccttgcagcgctgagaaaccggtatcggtttgagtttccgtctcgatatcgatttcgccctgatgatcggggtctgaaattgcctccccgccaaatcccgccgagatgggcctgccccatacccaatcttgagccgtcttccagacctcgtcaatccatgtggcatccacgacatccaaatcgtccaccaggtgaccagacagaagtcgggaaagcctaggtctccctttgagagcagtcaacactacgtgaggataatcccggggcagcgatatcttgtcggggtgcgaaggcttctcttccgctgcaggagggggcaatggtacaagctctccaccgagcgtgactatcttcctcctatactccggaagcgctgaatcgagcttcgtaggaagcaggtggatacgaataccagctaggagaggtggaacgtattcagggtgttccgcggacaggtttcggatctgcgaggccgacgaatcggagtttgttgttgcggaggaatgtccagcggggtgaggtagcggtggaggtcgggtgggtttgttttcctgtctgtctgtgagctgtttgtcctctgccccctgaggtagacgattcgtcgaacgagacgttcgcaatgacatccgataggtttgcgacatgttctggtctgaccagctcgttccaattcgtcatcggttccaagccatcgtgggctcgatcaatctgccgtttccaaagaaagggccgtactggcagctaacttagagagcggttgaacaaggtaacggaagtaccactcctagtgtctagtgtccatctctcaaagctgtccagctgctaccaaagcccaagagataccgccatattcttgattgtagacaagggcgatgagcctgactcttggacgaggcggtcatctcgcgttgatcatgtcaatatcctcttttcgctatttccacccgtttcaactttcctcttgaaaggttcggaagggaacgacgatcagggtagcaaatggcgaacagaagtagccccgctgtcaagtactcggcgacgacagacccacgaacgacttcacgacagagaggtttcgataggcaatggaccgacaacgcagagagaatgaatcttgcatacttccggcttgcactcgaccatgaatgacttcggaaggttgagaatacagcgcttactcgctcaggtccacttcggcaactcctgctacatccgacttcgtaccgccacccggtaccttgccacccttaagtttgcgcttcatcgacgcttcgatcatggctctgtagattcattcgtctcagtcgaccggttctcgaacatgagatcacgggaacgtctagtataactcacttgcggttctttgcgtcttttcgagcgagattcttgccggctccaccgatgtccttcctttcgacgggctttcgacggcgttccttcttcaagtttttgcttggcttaggcagctccagcatccacggttccaccttgcatccggatgatttcatgacgttggcgattctggaacgagacagtacgctggattagactgagaaagccaaacgcagcaataccttcttgtcatccacacgcacgttctaagatatggaccgtcctcgagcgtaaagtaggtgatcgcagaaccagtcctgcctgctcggcccgctcggccgattcgatgcacgtaagacccaacggtctgagggaagtctgtttgtttgagaccgtcagctcggatatggcggctatgagcgtcgtaaaagagaccaaccgtagttgactaccacctcgatccctttaaagtcgagacctcgcgccatcaactcggtgacgaccagcatccagagcttgccttctctgaactcccggacgaccttttccctctccgccttgcttttctcgccatgaacggccccaacccgcatgccatccatgaccaactcttggtaaagctcgtttgctcgctcgatcgactgaacgaagataaggaccggcgcgggaagctttcccgcagcaatgtcgttcctgagtgcgagcaatttacccatttctgacccgcagaactgaagatgctgagtgaccgtggtgctgggagcatccctgttagacgacgcggtcagatctcttgtgcacgggaagaacacagctgccatatcctcgactgacttcaatccgacgactatccgcacgccatagtccttgagccaagtcctagccaaagcttccggtccggcttccatcgtagcactgagcatgaccttctgtgctttgggatgcatatggccatcgatgatgggctcgacctgaggtaggaagtcgggtccgatgaggcggtcggcttcatcgagaatcaagtatcgggtgctgtgtacgtccgtaagtcaatatagctggcctatgtgaggcctaatgtagggggaaacagcaggcttaccctttcatcaccacttttccggcctcgatcatggcatgcagtcgctcaggcgtagccaccaaaatgtcgacgcccaactgctctggttgtccagaagttgcgaccgccatctcggtcgatttttcgagcaagagcgtcctccaggtgcttccatgcaacagcttttgcacctcaccaaagatctggagggcgagctcgtgagtcggtaccagcacgatggagcgaatcccttgctccccagagcctgttgcctctcctttcttgtgcgcgttgaaagctactcggcacggctggtcgagcttgagggcgagcgggaggagataggacaaggtctttccagatccagttggtgcgatgaccaggacgtcacgttgctctttcgccatcatggccccagagaccgctccctgaactccccaaagctgagtgatagcatccttccgaaggttccgcaaaagtacggaatggcttgatgggaccagctcatcgaacgatgcgaatgattcgggtaacggttccggtcctgacaagttgatcttctgagggggaggggcgatggaggcaactgcctcgtcctctgagtctgaatcctgttccgaatcctcctcgactttaaccttggtaggcttgtccgtcctgcctttcgtcgaactaggcccagccgcagccgagctaccgaagaagtcgagtccagcaggtaaatgacccgaaccagccgaagtttcgatctccctcttttgcttcttgttcttgctctagagacgacataggattgggacacacaggaaagcatgagccgagtgtaatagggacgcccccgtcaggaaacttaccttgccgctgaagagatcaagatctttcctgtacttctgcttgttgaagctggcccctcccatcgagagcaattgaaaagctgatgacgccataatagagacttgaagggccctgttcgacgcttactatacccttgagcttattctggagaatggtaaggagaagaactgtgaacgttgtcgtcctacgatattaatgagtacctggaagagttggcaaagttgacaagtggccaagtggtaacctacatataccgctcagtgggaaattcgagcggaagctttttgggagaacctcgcgagactgattttgacgcacatatttagcgaaggtttcatgagcttataatatattacttcaacagcgaaagccctcatcaatggcgcagtgcccgagcggtctaaggggagtgattagaattcattcttattatcacttatgctttgcatgcattggttcaaatccagtctgcgtcgagataattctttttgccctcgggcaacctgattaaaatcggtacttgtgcgaactcgttaagctttttttttggttatatccctctcatgcggctgttttaccgctcaggtcgtacgcgacaggaccgcctcaggagcgtgtgacgtaacgcgcggacgccggtgcgcgtgataagttatgcctatggtttgaggtcgatacgacggtttgatgacgacagtgtactaggtggtcgtctagatttgattgatggccattgatgggaatgacttgcccgctgaaaaattacaaacggcagacacctcactctatcaatcgatcagccgacgttttgcacaaagcaagcccttttgatcgacttagctgctaccgggatcagctgggtgctctcatcaaatagtccggttgactgtcagtgagtattcaagtttgcagcatgtcatgtgggtgttagcgctcggtattacactcgttcatcaagcagactcaagactcctaccaaattgcgagatcagcatgattctaccggtcgattgctttaccctgtttcagtcagtttctagctgcgatatcggaacggtctgattgctcacaatagggcggtgacggcaaatctgtcgtaggagctgcaggtcttctcgccaaattcaaagctatcagggataggatcaacaattactacttgactgccgaacggcgaaacgttggaggccagaatgttgggagcaacgatgcacgtgaatcgaggatcgcaacgagggcggcgaaggacggaaaggccaggagggataggaagaacaggaagcagggtgacgaaatcaaagatcccaatgaccaattcggaaacctctttatgggaaaggtgacctgaccgcgggtctgcaacctgtttcaatgctgaggtctgatacctggcagccctctactttcgcactctaccatcatgacttacgtcttgatatgacgaacgtcgacttgaccctcacgctcgccgagcgtaaagctatgctccccacagaagtcacactcaaagctctggcgacggcccagtctgcagccgtcgcgctcgcgaagcgagcgttcgatcacaatcccgaagccttgctcgacaatctcgccaagagaaagcaagcggaacgacagctgcgctagacagcgtctagacagcgtcaaatgacatgaggactgaaaagatacgacaattttacgaatttcctagctatctttcccgctactactgttactacctatcccagccacaaagtttgtaacacgtcgacttcctccattctgatgtcatgacgttgtgaaaatgtcatcgttttaggtcaagccggtcatattttccaggccttttttgtggtaaagaacgaccacgtccagttcgtcctggttgtgaaaatttattgcagagcgttggcccgactagcagctacagcaatgcctggcaattagagcatgacttccatgaggctggaaactatgtaccattttcttcgccattaggtactctcttccacgatgacgaacagacgattcacggcgccgttgtctgggggagtccccaagggaaagtccatctattgacgtcctattgtactacaatattattacggaagccttgagcaatcaatactacttgtagggaggattcgaccctgtcaaatgtgtttcaaatccagtctgcatcgaagtttatattattgttttggggttttcccccttcccttgtcaaaaacggtcggatctaccgtgttgcttgtagtcgctatttcctctcgactgtccggatgatgtcggcgcagtatattttccgcatgtcgctgatatgtctctcagctatcagtttggttggggcgggaggtgttaatgcaattacaggacggtgtgcacgaaaccacgtcgatcaccacccgctacccggaaggtgacgaagccttttgacctccacttttcgacatcgacatgcaggggacaagacagcctcgaggtgaacatttgtcggtcacttggatcaatgcgtctaagcatgccctgcaactcgcccacatcgctgtttaggctcgaatctaccagaatagctatctagcctatctcaaggtagcatgtcgttcgccttgatgccgtcgaccaaatccatctggacgtgttcccgacgtttcccctcgacgtccagcagatcctttacctccactcgagccgtacctcgaccccgagtaccactaggtcgcatcgaagtcaagaggatccccatcgatagtcccgaggcattcgcagcacaaggattctcagcgggccccccgaagcgatcgatatggaagcccatcgtcgtaagtttctcgtcagacgtctagccctgagatcgcgcttctcaacgagtatgctctcgctcctttcttgcagtttgcgacgacgttggcaggatctgcgtatgttgcagctgcactgtataccaatgccgataccaatgcatggtcagagaagctcggtcaggggtcttggtggcggagagggagcgacctgcctaccgacgaagagatcaaacgggccaaggctatcagcacggccaaggtgagtaacgaggccttgtcccgctttaattatatcccgctgatgcattcctcgtattcctttcgtctttcagggcttacaaaatagcctcaatggcctcgtcaaaagcattcgagactggccggaatccctcaaagtgccaataactcgagtctacatcagtctctccgaaacctacctgcatacccctcctgcccaactggtatgcctcggaattattggattcaacggtatcgtctttctcgcatggcggatacctcgctttgagcccttcatgagaagatactttatgcactggcctgttggggccaaccaccgcgtgatcacgctcgcgactagcgtattcagtcatcagtcactacctcactacgccttcaattcaatcgccctctactccttcggttcggcggcataccagttcctttctcgtccaaacgttcaggacattgatgcggtcaacaacgattcttggttcggctacgatttcgggccgtatctgggcacttctacggcgacgccgcacttccttgcctttttcctcgctgcaggattggtatcctctctgacatcacacttgaacactgtcctggtccgattaccacgtctcctgcgggacctgtccaacacggccagggtgtccaccgcttcggcattagcggcacactctgccgtcttgccttcgttgggagcgagcggagccatctacgcgaccctgacgttgacaagtctggcattccccgaagctagcgtcagcttgatctttctcccctttgttcctattcaaatcgggtatggagtggcgggaatggtagcggttgacgtcctcggcttgattcgtggttggaggtgagtcaagacgcgactgtgtctaatttccagacaccggactaacgttggacgtcaacatcaaagggtgtttgaccatgtcgcccatctctccggggcggcctttggcttcttgtactattcgataggcaaggacttttggacttggctcagggtcaagcttggagcacaagagaggagagtcggcgaggcctgagagacgaggttgccggagacttatgaacccaatatacacgtagaaccacacgtaattcgaggcgggatgttatattcgcattttgtatacagtttcgtcaagtgttataaacaccgctttggacaggatcgctttgttcaccatgaatccagcatatggccgagagaaatgcgactcgtgtccaaacgaaccaggtcaggccaggcctgccaatcgttgcagattttgaaacctctgttccaacatatccagcagctcgtcctctctctgaactttttctctggcggaaccgtcgactgactgttccgccatgacaccaaaggccgataccagatcatcgagctccttcttttcccgccacaagtcttcgttttcgtctccgaggtgttccttggcgtgatcaatagcttcctggtcgataggcagaacgtccgaggctttgatccggcctaggtccgagatcaatgctcgaacatgttccaccaagccgacatccggagtggccgtccccgtcacacaggcgagcaacgccgatgcggctcctctcaagtttcccaacctcctgaccggcgttacagaagtcttgaatgattgatcgaacccttcttgaagtgacgataatttcccctcggaaattccttctcggtaaccgacatcgctatatttcgttgttatccggtcccagttctgggcgaccatgggatcgccaacaccaccagcaggaacggctggaccatcgtccaaccaatcgtcgtccatgctgaactgacagccaggaaatgaagggaggagatggagagagcttcgtgagaataaattcggagacctgtatcgataggcatgtcgggaaccagaaacggtgttcatggtcagtcagtggaaccagtcttcctgggatttgcaagagattgacttgccagtgaacgatcaaagcgaagagatctcttgtactgtttccttcgatcttcaggccagatagccagggtatattatagctagagattaatctcgacgcactcgtcggtaggagggtttgcaggatgtcagctgttaacagctcgactaagaatgatgaccaagatttataagggagtgcttcggatgtaaatcggaagtccgcggaagcatatgtaagtacggataagcaggtgcaacaccgggccaaccggcgagtattgtttctgtgccccaaggcctcgagatgagcatctctacctctgctgcttagcgatagcatttcgtacctgacatattgcttatatcactgattatggctgtttgcagaaccctctccgaatcgctagcttttcgagcggtcgcgatgaagagtgctcgatcagctcaaatggtccgatgacgatcgaaggaggtttcttagtgaataactctgttcctctggcaataccggtaggcttccacctccagtgtgttttcgaggccgtacagcacgaccagacccgcctctttacgatctccaaattgcttcgatcaaacctccgcgaatctcgcgcgaactaaccccacaccctgtcacagcgatctttttccaagcccgccagtgctctattcgtggacctatctgtgctcactgcctcacgttcggccccatttgtgaattggtcaaaactgatttccatatttcgttcattacaataagcctgatcgttatggcgggtcgtcgtgaatgcttcgttaacgaaagacagtcgtgtcatcgtgtcaattctatgcagtagttttgtttctatgctgattctgtgctgattcaatgccgagctaaggaaccgaacggccatgaggtccaagctcgcttaataacctgctgagtttacactgaccttgtcgttatcttctggtcaactttatgacatgtagtaattcgatacctgctcgtcgcttgagcacgatctacatcgccgatgtatatcattagctggagtgccgcaattaggcctgattgccgcccctctactcacctcgccacgaaatccgcgttcggccatggtggaaatgatttgcgcaggctgattcgcactgacagcgacaagatacaatgttcctccacgattcagaatgcggggcagcatgtcgaggacgatgttggtcactgccatgccatcggctccgccggcccatgtggctccgatctcggccgcgagttgagtcctggttaattcgtcctcctctgtgggcacgtacggcgggttgaagacgaggatgtcggcgcccccggctgcttcaagtcgctggagtatgggtgataccaaattggtattgatcggattcaagtgggcctgattcaattgcgacgtggcgagcgtcgccaggcatgcgtgtgggttgatgtcggtggagagaaacaaggcagaagagggctcgacgatcgttgacaggaatgttgatgcgatcccggaacccgagccaatctccaagcagattgtgggctttctggctttgagctctatagcgtcggcctctagagcatcgaggaggataaagctgtcctcggcggggtcatagacgctgtcgtgtagcttgccgtaatcgggcgtcggcaggagcgctggcgtagtgaccgtagccggggcggaggactgagttgaaggctgtgatgagccgacatcggcttgatcgacgttcgcaaggaccgagtccatcgccacgatcacaacgtgagtgtcgatggccgcgaggccgcggttaccagtctcgagcgtagcaggatcggaagccactgcatcctttactgcgcaggtcttgctcgatttcctcgcatctagccaggcctcccaacaatcgtcatcgtcctcgtcgtccccattcttgtcgttggcctcttcttcgtcgctcgatcgatcgctgtcggtgggtgtcgcgcttctaaagtaacctgacatttcgcccgaaaacagggatgatcccccaagttctccctcggcttgccacgaatcgtacatctcttgctgctcttgaccccaagtacccgaattgccctcgagaccaaactcgtcgcaagcactcccaccaccgtacgaatcgttcgagcaccaactgccccacccttgcttcatcgacagggcaggcttttggacttcagtctcgcggaggatgacgaggtcgtaatcgtcatcggtctcgaagatggtacccatgcggaaagattcggaagcgaggcggtccgcataggcagacaactcttcgtctggatcggagaggcagcgactacccctctcgggcatcttgcacgccttttcctcttcgctagggggttcgagcggggagcggtcgtattcggtgcgcgaccacgtaggatagagcgactgtaaagcgtagtaggccgaagcgtcagccctcggtagtgtggtcgtgtgccgtccccatcgtcgcaactcacgcaaagagcaacctcgccggtcacctcgggacaccctgggaatctgacccgcttgctcagcccaacagtttgcaagtgtcccacaaccgacgtcctgcgggagaatccgtactcccccgtgtacagatgaaccttgtcggactcgtcgaccgggggggtgaggagcccgtccaccgaccgaggcgacgacggggtcgatgaacccgatcggaccttggtcgcgccgaatttccgaccctttcgcttccgtcccctcccgtggtcgaacaaggcgtttctaaggtacccgccgagctcgacgagcgggtcatgcgattcgatgcatgcgccgttgacgaggtgtcgcggcaaaaaggggggccagtctgatcgtccccgcgtcggtaggagaaacggcaacgtccgccattgccaatccacctcgtccatctcttccgcttcttgcttcttgcgtttctcatcagccaccccgctcaagagacccgccatcatgtactcttcgatttcgacctcgacctccacctcttgatccagctcgacctctgcttcatcgtcgtcgtcgtcgtcatccgacccctcggaatcgggacgcgtgacgagaggtgccaccggatccccctcctcttgtttctgcttcttcaagcaactcctcaaggggactgccgtcggactaggacttcgtctttcactggacggcatgatcctgactcccgggaccgctccgtaagcaggcgaatcttcatcctcgtcctcgctcgcatcgtcatcctcttcctcaatctcaatctcactctcatcctcgtcgtcgtcttgttcagacccaatgtcctcgtcatccccttccccatcctcggcgtatcgctcaaacgtcgattccgaccccatccggccgaatgccaggtcaggttcgggtgcttcccccaactcgaccgtctcggccgttccccccactccaactccgactccaactccaggtccggctgaacagagtttcagtgacatgatccgcgtatttgatccgtcggccagtagttgaattccccttggatcggattatagcgatgcggcaggtcggggtttgatgctcgaaagagaggaaagggtagtcgatctgatttgtgggtatatgatatatatgtgtctcccgatccgatccggtgggggcttctccttggtcctttgattgggttctctgagggaacaaggtcgaccgtgaaaggaaccgtccaggtaataccccgggaatccggtcaagagggataagaaatgggtaaaggctgattaatggcggagcccaaaatccgctggacgagggaatgtgaaaggtggacgtctagaaaggcgccagggcggtcgagttgacggagacggtgatgatgatggaggagatcatggtcgacatcacgtccgtgctttcgaataaagtcgtctcgactgcttgctgcttgtccgctgatatgatcgataaggacggtatagcctttagagatggaggcgagaagatgtggacggcggagagtgttcccgtgatcctcacgatatgtctatatctgggttagggtagttgcagtggtagccgggactggtttgatcgctttgatcgtcgttatatgtcgcccgtattgccggtctgggtcaggaaaaggaacgtggatgtagtagtagttgtgtgtgtacgggtgtgaccctgtgaccttgtggaatgtgatttgatgggggcaagagtttctagcgtctagcttgcagcttcgatctctcggtcagaaccgagggtggatctgaatcgacgtggagccgtcgtcgtcgtgttccgtatttccttttgtcgtcgtcggagcacagataggggtcaaacggcccgaaagtccctgggtcggctgctacgtgctacttcggtaaacgaaggaaggtcgatatcgccggatcgtcgtcgtgcccgcgagtccctttcctttcttttggatcgaaccagctcttgatggccagacgatcgatgtatctagctctggaaagcaagtctagtagtcgtgtgtaccggctgaatcgatcctccttgttctgaaccccgctgtgattcggtcgtcctcagcttgttttttcccgacgttgcgctcgggtctcgtttgaaattgaccgatcgtgcgctgaacttgctatccacctgatcaaattcgttcaaaccgacagacgcgagccaaatcacataatgatatttgatcagctctctcgatcgtactgacatggtcgtattcgtgctccggtacacctgatggtgattgtcttctatgacgtcgggcattgatcctcgtcgacgagatcaaatcatataacgtccctctccctttttttgggcgccaagttgaccgaacagccaagcccgaattcgatcacggatcacggaaggatagctagatctcactcacctcgctcgcgatgcgggatctcaggcccagaggtgtatatgctgcttgtctcctaatgagtgtttcaaaggtgatgccggatctaggtaccttgtagtgctcgaatcagtcctggtcgattattttgctcgtctgatcgtctgcgtgatggctgattttgtgttgattccagatgatttcgtcgtattcgctcgtttcaaaagcgcgagatagagaagagagagcggagggggaaggagagggagggagagggaacgcgcgccaaaagggatcacgtgatgccaagtcgactagactactacaactcgaacgaatggatcaccttgcccaccctcaccttgacatcgctcacatcccacccatacttcatacatcccctaactcgcctcccccacatctcttccaatcgacctaccaactccgcgtcgaacggattctttctttccgacgacgatgtcaagagggaccaggcgaacgaggcgtgaaactcgggatcggtgtggtataaaggaaggtgatgcgtcttcaagaacggatggatcgtttgttcttgtaatcgttgcaactgcgaggagaattccggaaatcgtcatcatattggctcgaatcagcggattggcgtgaaaaaagcacgccttttggaaactcgcctcgtcatgccccacgccaaccttgagtgctaagaaccctcgactctgcctccccatcccgttcctccccaaatcgtccaacgatgcgcgcccaccatcatcttcaccctcgttcgagcgtcctcctccctctatagtccctgtgtcaccttgtcgagccccgttcgtgtacgcccggaacccgccttccaacccgaccttgatgccacgcccaccggtcgctgaaccgctagccagacggtccgacccagcaccaccgccgccatcgggtctcatacgggtgcgcaagtgcgtgaggagtagaggaatctgggacgtgcggaggggaagcggatgggtgagggagatgtgtaaagcgttggatacggtccggagggtcttcctcgggtctgtcctagtcgcaggagagtccgagtcgatacccaactcggacgaacggtccagattcgagctggttctatcatcgctgatcgtttccgccgttgacgagggtcggactccaccatcatcaaagatcagatggatggtacattccccccgacctaatcgttcgtcgatccattcttgcgcttgatccgtgatgaatttcaaggtctccttcagggatttcgacattttgactagagacccgggtgtcggccgaaagtcgcagagcagagagaaaggtaaggttttttcgcgatttcagcacacggcaaagacgatacggtgatgatcgcgacgagacgaataccgtcaacgatgatgatgatgatgatgatgatgatgatgatgatgatgaagatgcgggcgcaggcaggagacaagcaagtactcacgttcgatataaatatgcgcggggtattctccctggacccacggtcgcgctcgagttcggccttgatgtagcctaggatcatcgatcggggctgtgaggtcatatcggtgtcgcgacgaaggtgttcgatgatgcccgtatcagctcgcggattcagtcgagtgaggaattatagacaagtcgatgggaagacttgccggtctgaaaggtcgaggtgagcttcggaagcgtctttttcggtctggatggggcaggtgcggtaggaaagtctcagaggtacatcagctaatcatgtccaaaccgattcaatccgagaaagggaagcttactttttgcacggcctgggtgacaagtcctccccgacgtctccaccgggcgatacctgagcgaccttgtcccggacatctacatcgcccgccctcgttcgtttgcctagacgtgataccgagcttgaaggttgagcggactcggtcgtgtctgaaccagagtcggagtcggaattaccgtagtcgaggagatccattcatggcagcttcacgtcggattttgctgaacaaagggcctgtccggtgctgaaaggtgagatgtgaagtaaagtcgaacggcttcatccatgatgaatacccaggtcgatcggggtgagccgatcgtatgctggatcatcacgtgatagcctgttcgcgtaaaaaggtggctactgaacttgttgtcgacacacgaaaccgtagtcagtattacgtatacctaatagctcagaaggtcggtcagactagaggatgttgcctagttccgaaagtagagttaccaggggacctccggcagtggcactggggcagaatggtggtgtggcgagtgtcctgccattctgttaatttttgattatttttttgctttttataccccattaccggtgggcgacgatgggttcgaacataaagtttacttcctcttcaacgtcgattatgccgaacccttggaggacggtcatgtaagtttggccaaatagcttgacagtcggcagctgtcgtcgtcggagccatgtgtgttctcagggattgttcaacaaataaatgttaatctgctctaggtcgattacggaatctcgcgaggtatgttttcaggataccgtaccatttgtcggtccataagttgactcgacctccgggacgctagccgcggtctgctctcgaatgagatcgaagaaaacgctgaagcttggaagaactgacgtgcgactcgaaacgctcatgccgtcaggctacccaatgcctcgaataacaatctcgagatgacgacgcagacacccatgtcgtcgaagtcatgtcacgcatgtgagctgcttcgcactgagcggcttcctcggcggcggtacgaagcacttgcatgtgtgcatcatctgcggcccgactggtaccaccgtccccgtatcctcaatttcgatttcacattgtatcgctcccacatctatacacgaatcacctcactctcaacgccgctacctgaaaaccctgttcagaccgctcctcacggccccgcccaacaactgtccaccgatcccgccgaaatcgccgaatgggttcatcccggacgagaccttgttggcccaacgcttcctggcgtccctgtcagcgtagctacgagatccggatcgtcagattacccgctgtgtggatgatcgggtatggacttacgtgaaaccgagggcgttcgacagattgaagatgagcgccagaataacgatgggaaggaatctagtattgacggtagcaagcgagtcgatcagtcttcttcgatgaccgatctgagctacggtcgagcatgcttacgagatgttgaactttaacaaggagacgaagaacaaagctagccatccgagagggaagacgtagagggcgaactataggaagggggaaggccagtgcggatttcgaaatcagctaccgttttcgaccaggtcgaaactacggggtcggatagacttgcccaaaacatcctaatagacaagtgcagagtttatacgatcagcaagggcagtcactcgtttggacccaactctggcttacttttcatcgacggcgttcgcgggcctcgaagcctaatcaacgtcccgacatacgaagcagagtcagtcatgaccaatgacgaaacgaaacgaaacaaaacgcgacgcatagaccctgactggactcacgtcacgacattcaaacacccaggctgaatctccattctcgtccacttcgttccagtacctcagcccgaccaaagttcggccagcgacgttctaccagggatggcaatgacccgacatcagcttcgatctcgataaatttaacggtctatcatgcgcgaattaggacccaccttgacgttccaaaagtcgagagagaggagcacgacgacgatgacgatctggacagagacggccgccatgttcagccacaatgacaggtcccgcctcggcatcaagctcggatccgactcacgctgagcacgtagttgtcggtgaatagaccgcacaggacgtatacggcgagcgctgctgaacggaaaaagtagagagctgcgaggaccatggggtgggaagaactccggaagatcccggcctgcattcatcattgaaagggatgggggggagtgcaaccgtgtggtcagcttcgagtctggccgaacaagcgtggagatggatcgtctcacgattcccatctcggcatcgctagcgtttcctccttgaacgctagtcacggcgttgttctcgttgccgttagcaggtcctggagtcaagatgaccggttcagctcgaggtcgacctgtggaaccgatgttgcctgatgggaatgggtcctcgtccggttcgatggtggcttcgaacaagggggtagaggccgacatcttgaaaggtttactggtcgatcaggaggtgatttgaaggtagggtcgagcggaatgtgcatgtaaccatattccctctttatctaacatgcttccgaggttgatggtgagcctcgaccgaggacaacctaaggggatcatcaacaacatcgaatcacacggaaacgcataaaatcggcgtttttatgcgttttaatcgaaatcgaccgatttatggttccgactttgagcagagagtcgtagcagcagcagcaacaggcagcagcaggtatgccaagttgaccgggaaaatatcaatttcgaatggcagcagctggcaaaggttgactatcacgtatcacaccgtagaacatagtcatccggggcacacgaccaataaccttgtcggaatgcgcatcccttggttgttcgcctgcctggcatggtgctcggtaaggcataatcgtcgaactagcacgatcgagaggtcattctcatcaacccctcttgcccggcttgatcagatgacagtcgctcgagcgagctcagaggcagagttttcgagaggtcactcgcctgtacgtagccagcttacggcttggaaggagacgacgttggcgattcgagcgaacgtcatcccctctacccaggacacgttgttttactgcaaatgtacgtcccgactcggtaccccggctcttagtaagagatagaggcactgaacatattctgtgttatacttcctattcgctttggctcggtggtacaggcatgtgtttcgacaactttaccatcgtacccctttacatgccggacaacccgtcaaaaccgtgtctgagctgtaccaggcagttctgtctggaccagaaactccccatctgtcgaggtcagtcccgtgtgaaggccttccccaatagtagaattcgtgagtcgttggagcctgggctgatgagcttgtcccccttggtttttgggatcgtaggagcggaagtaccggacttggacactgatacgggtacggggaaagaaggagatgtcgaagccagatgtttcagtaggtctactttatcctcttgcggtacgcgggcaagtgcaactaaacagtcgttaccgaccatgtcttttttccttagaacgagattctcctcgggatcagctcgtcgtcacgtgtttcatcctgatcgtggtcgggctgttgttgacagcagctatacggaatcggtaagtgggcggtatcggttgtggtgtacttgtggatcgatccagggactgatacaatgaccccctgatttaaatgattacaggttacaagcggctatagcggaacgaggtcgaccgacggatctgcgcgaatggagcgaggtacgttcgacgctaccacgaccgactttctcggatcctcgagctcatctactcccgccctctttctcttccaggcgctgttaccgaccaacatgttgcagactcggaatctgggtgaacgaggtctaggcgtgattccagcctggatccggggcgtcaatgggtcaggcgcggggtcaggcgggtacggtagggtcggatgaaggaggtgtgaacgtttccattgagatgtcattttagatgttggttgtatcactatgtgtcgaatggtcgatagggggtcggtcggttgttggacaagtcatgtcgtcttgaatgaccatgacgtcatttttcgtttccactcacctttaccggacccggacccgtcgaatccacgaatcaacaacaaaacatctcgttgacctcgatagtcgattcttataccacacacaaccaagttaactctagtgtagaacctctgtgacctccttcttgatctcttgcaaactcattaatcccccgaacaatcgcttgaacactagtaagcattcgcgctgacacgctggcgggtacgagccaagctgaccacacgtcgcacctgaaccagtgtctcccgttcccgaactcctcctcaacctgccccagcaccccatcttggcaggtaagctagcgagcgtaacgaaactcgaatgatctggagacatacccctgacgacatgtttcgccattcttcccccagtcggtctgccggtcggcttgggaatcacctcgggtttgctctccgcttcgaggaaccgaggagccaagtcggcttggtacgaagtaagtaaaacgcctcgtaccaccttctccccctggccggcgcctacacattattctagagactgatcgagcactccgtatcgtctatatcttgtctcggtagaaccaactgagccctcccggccagcctcccaagtgggcctttggacctacctggacggtactctatgctggcgagtccgctcagatctcccctccgaatacggcaaggtagctgaccgtcaatttttcaccccgcgtaacagccatgggatacgcttcccacttggcttggaaggcttatgacggcgctttgacccctaagggaacgtgagtccacccccttcatcttccgctttcccggcggtacgggttacctgaccgaaaactcgaatcccctttaaagcgaggtcgccgtccgttcgctcgaactctactgggcccaactcgccctcaacttgatgtggacccccctcttcttcggtctgcacaagaagggtctcgccctcgtcgacattctcgccttgaccgggacgtcggcttggtggaccaagtcgttattcgagatcggacccgtcaggatccccggtgtcggcgacctcaaccccggttggttggccgtcccttacctcggttggttgagctacggtgagtcccctgatagtcagtgcgggtcgaagtgagatctcggggctgaacacgtccggtttcatcttacgtagccacctacttgaacttgggatacctcgtcttgaaccaggacaacaagcccaagaggtactaaacgatgggggaaattccctcttgatcccatcgtgataaagtcgttcggatcgctactgtaacaatcagacaggcgcttacagagtaaacgaaaaatgaaaccacattagcatcattcacaggtccgctcacgaccacctgcgagtgtcgagcccgagacttggtttggtcatccgtgcctcagctcgactggaggcacggcttggaactcgatttggtaaatcgaccctggacttcctgacgagtcggtgtttcgggttatcgaggtacttccagatcagacccgatgctcgcatgatcagacaactggcgcaatcaaaacgtgtcttttagacctagacgtgactcacggaagagtcgcagtagcatcacggacgtggctcgagagcgatctcgaagaaatacgtcaggcgaccgtgcgctcggtctgggttcatgagagcagacagcggctgcaacacgcacatcgtctaagagtccccccgatcgagttcatgtgcaacaggagtcgatttctgattctcatgaaggccatggcgttcctagatcgtacctcgctgtatacttgtcgtggagctgcggtcaggtcggcctcgaccgctgccatgccaattgccgttcttcgactcttgtggccgacgtctttgaaatttctcggctaacacttggatagaactgtataccgagatcgagctgacgcgtgggggacagaatcgtcagaccttttcaaggcggctgcaactgccggtgcagaggactcctgtcgaaagacgaagcgcacagatgagcgtctcatgaagcgatccccagcggatctcaggagaccgcaatctaccttggccaagtattgcacgattcctacgaactgagcgtctcaagaaactatatcccctttcagtgtttggtagattctgggaaatagaagagcggacaatgacggtacggggacgatatgttgttggtacccacacgtgaaaccctcgtgcgcaaggactgtcggtttgtaccaagtggccgaggacggtgcgaggaatcagaacccgctcctctctactcgcctctgaccgacatgctttccacgaatcagaaaccaacctcgctgcgccggaccggccccagcaaccgtcgatgtggctttctaatgcatctccattttcgccgaggtgatatgcgccgctttcagggaggcaatctgatatgaacctcgtaaaatcgaccataaatacccaatacaacaaagccgccggaccgccgactcgatccccgcatctccacgttccaatcggtcacaaacctctagacctgacctcttaccccccgaacccgttcgtactcgttgtgtgtcctcaccgcttcacccaacgatcgacgacctcccacccgcttccgtctgtccgtttcatctcgcccagcacgtcctcgtatttctcccaccaccactcgtgcgtccccgtcggatctgctgaatcgtccgagcggaaatgttcccacggtttatccaaactgggttgaaggggtggcgatgaacaggatggagggcgcggtgagccagtgcccgatgtacgcaaaagggaagcgcgtgacaagacgcctcgagcgactcacatgtagtgtaaacaccggacctcttcgtccctccatacatccgggtggaccttgcgcagcgtcttgagggcattgtaacaccagctcagcgatttccatttgccttgaaaaaccacggccagtgcgtcctgatcggggaatttgaaggtctggacgatagggtccgtctggatgtactgggtgagacgggaagcgaccgagagcgaggggtgcagcaggacgagacctgaattgagaagcgcgtggccccggggagaagagctcgagtcggatggactgaaaggtggaatatcgggtaccggggtcgggttggtgagcgcctctgggtgtcgtacggcggtatacgcgcaattctctgggaccctgcagtaagatgagatcgatcgagcgaggtcgtccgggtgtgagcaagcgagaaccctggatcgcgatcgtttctatgttatgcaagactgaccagtcgtccgggtaggtagggatctttcggggattacacgtgcaggcgtgggcggcggcgatccattcttccgagggaagagggagggtcatgagcgagtccatgttctggaggacgatcatgtcacagtccatcaagaccactcgctgtcattgagacgtcgaggtcgagcgggcgagacaaagttcatcgcatgagtgagtgaaggagtgagtcaagagggacagactgggtcggatagtcctttcgttggcggatgctcacctcccattggaccagctcaaaggcccgcaatttcgtccaagtatccccaaacctttcaaacacgcccgccccgccctggacaggtctcaagctttcgacctctaccatctgcatccctctacccttgataacgtcccggctctcttggtccaatgatggtgtgaccatgacaacgagcgggtagacgctctctacggcttcgaggcatccttgcaggacgacgagaccttgaaggtattgcggcttggtgatcagggtcgtccagcacgcgttgacggggggtgtcatcgatgtggctgtggattgtgtatctggggatctggatcgatccgagttcggggtcgtggccgaggagatggaagacggggctctcatatcggtaaagatgtcggtcgagctcgatgtcgtcgtcgtctttgtttcgagggtgctcgatcggatcaacgatcgggagacagggagggcgagctgtggatgctgggtatcaacgtctgatgcagctggaacagccatgggtcgcgagtatctctatcgtggccggcgtaagaggatgatgtcgagcgtgtctgcgtgttgtgtgtgtctgtgtgttgtgtgggctgaaatcgaggatgaactcgatcgttgccatcctcctcgtctcgttttgcggtcgccgtcgatcaatttacttccgttcccctctcgagctgccgtttccctgtccctcttccgcccatgccccccgccccgcgtgcgcccgcctctcagctgttcaatgccgagctgctgccgagtcatttgcttccgctcgctctctcccggtgacccaccgagatcgaacgaaagaaggaaaaacgccgcgcgcgagagattcgatggatccactttgactacccagggtgagtgaccgaccaacacctgtgactgaccagcgagtggggcgggaggtcacccggcaataggtaaacaagtgttaccacactcaaattcacactgcgatgtctcaatcggttttgtcagactagtcacgcccgaatgagagctaacaactgatcatgccatctttgttggaccctactcgcctatcgagaacgacgactggcgcatcgaacgatcccccgggtatctcatgccagcgatcgctagctcgctcgaatacactgccgaaacggtgtatcacatagatccgtgtttcataatcttcgagagaacaagccgacgttagtcaaatcaaatgtaaacagaccttgagggtacggtacggtgctccggctctttttgtagcacatactgcgggaagacgtcccccggtgtcccgacatccgacgactcggctccgagcgatgggctcgtgatcgtgaagaccagcgggagcaaattgacaatcgtctcatatcacctcgacctcgagaatcacgggtaagatcactcgacacccgactcgctggtccaatcttcttcttcactacctcgatataaggaactgggaacttgcgcccgaaatcttcggaggatcagctgggaggggtccgatcggactctgtacgcatggatcatcagacgagcgagagcgacggtggacggaaaacgatcggtcgtcgtgctcgcaccggatctccagcgaattactacgtagaggtataactcgtcgtcagcttatatatagggatcgtgtgtcatcctacacacggtgcgataccttgtatcccggcagtgtcagagcacgatcactcgtaaaccaccgtcaccgcccctggggagggagctcgccgggaccatctgtcgacttcccggtcgaacgagcgcgagcgatgtcacgacgaagcgctggatgtcggcaaaaggggtagacggcgaacgtgatctccaagtaatcatcgggcttgatatggatcgggattgggattaggccgggccgttgcactgatcgtatggtcactagcctccataggggggaggggggcatcatcaggaacgcagcatacatcggtgttacatctgaaccgcccaagagacaatacacgggaatttgcctgatttaccaccagtctgccttggttcgtcttctcatacccgtctcgaccccgggcaaggtcaccacacccgtctcgattgacttcagcaggccgtcgatcgtcccgtacatagagctcacatcataagactattcctagacctacggatcatggagaacaacgtacatcgagcacccgagatggaccctcgaaattaaaacggtatatccagaatcgagaaaccccttcgacacgtgtcatccgtaaagggtgtgacgagggaacgaaacgagtaggtcgatcacgtcttgtgatcgacgcgcaaaaagacactcgaatcgataaaaaggctcttacgaagccgatagtatctggagacctcattgagaggctctgagacacggtccggaataagacgtatacgcttggacctttatctcctcaactactggggtgcagaattgtggcgaggtcgactcggataatggttcaaccctgaccacgcttccccgatcaggcctagaacgagtgcgagggagacagctgcgatggcatttattgtctggttcagcgggacggctcgactgggaaggtctagcgacgatagggaagacgtaggttgctgaaagggcagtggaaagcatatcttaatagtaacgttgttgcctgtgaaatgacatcaatggggatatggtttagttggtataacattccattagcatatctagcttatcttggaaaggtctggcgttcgattcgccatttctccataactttttggtttggctcacctttttatttttgtttttatttttatttttatttatttttctttattcctgggcgctttatcttacacttatttgtcagtcccgccacgaccgggccgcaaggtcgagtcaagaagccatacagtccgccttgtagtgacgagtgccgcgtagtatggcaaagaggctatctccccacaggtcggctaaaaacgccatcaattatcgctcccaaatcagcaagtaacaactacttattgcgagtccagtggcacgacatattgccaagatctgcaggatccggcttgtatttgaagcagtctcccttcgacgtacgcaacagaaccttgagcttgacagtgtccctctctgtagctacatctcacgtcagagcgcgggggacgacgtgcatcgctggtcatccgtgatcgatctcacttccaccgtttcagagatatcaataatgtatgctcatgtacctgagtgaatctattgcctgtttggtaaatacagtcatgctctttctcctcaaccccctggagcgagtggattattcgtttagaaagttcgaccgcccgctgcgtcgatgggcaggcgtgtgcgataatgatagtgtgtgcgtattcttttctctcaagagagatgcagagatcgtttcgagtgttcgtaaacctgccagaaaccaagtcagtggtaagatacgatatgttgggggctgttcaaggtcatcgagacgtaccacgtagctgatggacacggcaggaacgaccttggccaatgtcgggattagacctttataaagaccgaaccagccttcccgttgtagggtctggctaaggacgtctctgaaaccggtgtaaacttgcgggtgtccaggggagcccgaggcctgtagtcgggttcgcagaaggttgatggctggtggaaaggtatggcgagtcagcgcgaccgaatcccacgcttcaacccgaatgacttacgatatacactggtggctcctatgcttccggacaatgctccgaagcataggaccgccaccgtctgaggttcctccaacgcaaacgacttgcagtacgcaatcttcaaggcttcaaacgtgctcatgtcgatggccgaataggggaagaccccgatgagtccgagctggaggaacggtcgagcgcgttcagcgaggtgtacaacgaaagatcctcgactgtcgactcaccgtcaaacccctatagtacgcccgcatacctccccgcttccacatcccctttgcggtcctcaccattgcgctttccacgatcgcgccgttggcgggcggagcgtcctttttcaggttgctctgcagctgtgtcttgagcgtctcgaccgggtagatcatcaattgcgaggtgattccaccgattcctcccgagatgaacctggacgttcccgagatttcggtctgatctgcgacgtgatcccagtaccgtgcgaggaaacgtttctgagcaaggaaacaaggacatcagtgtctcgattcgcgggtacatgcaattgacgtggactgaccgagtattcgtacgagaagaatttgatcgcggattcctgatgtataccattcttgtcagcggacgatccatatgtggcagacgactgagactcacggggaagatcttggtaacgttcaatccgtttccgacccagaaggctctcgcacccccgccgtccctgtatatacgcgtgaccgcatcgaccaaatgtccgacgcccttgctaccgtacttgacagagtgttctaccagtcggctcgtcatggtcaccggcgccttcggatccttggccgccttcattgcctcggggatgtgcgtggacgtgatcagatagaccttgagtcgatcgaatggcgcagtggcagtacgagaaactacgtaaccgcagggagactgtaagctcagcgtcctgctgtagtatgtcttcaacgatcgacgtaccggcacccgcgatcccgccagctaacagaaacttccaagcgacatcggccccgatcccactaacaccctcctcctcctcctcttcatcttcgtcatgcaagtgctgatagtgtgcgctatccgtactcttggcagactgttcggcgctaccccgggcctcttcgtcgcaaacctcgtgtccgtcgactaacccagcctcgcggtctttacagctgatgacggcgtgtttctgattgcccggcggtgaggccttatcggtcacccgtgtatcggcatggctgccagagaccacctgggggtgcgatgccgtgttcgacgaagaggtatttgtcgaggaaggagaaggttttggaaaagatacgctgagatccccatccatattcagcctggccgctcctcgcccatcgttgattcgtttccggacttggtaatctggcaacggcaacgccatcgtcgtaccatcatcagctcctcgctctttgctacccatgacctcgattgcctggctcacacttgtaaatttctgctacgctggccttcctgggcagcagcagcaggaaatcacgaaactcggcaaacgtgataaacgtccgctcctgctgcgtctttttccgctccctctcccgttgagggttctctttgggttgacactccgggcgagaggctggtgaggacgacgagaggaactgcacgaaatcatatagcgtcgagtcggtcatctgaatacctgtggtacgggagccgggtcgtacaggtgagcaagatcttgtcagtcccgggagaactggcccaatgactaaccactgcgactaagagcacccttcaattcatggtgatctaatcgcccgtcgccgtccctatcgaggtcgcaaaagatgtcccacagctgttcctcctggtcccacaagaatttcctgaaatccttccatctaattcccttttttgccgcattcaccgagatgggattggtagaagaggaagacgatgatgatgccgttgttgtcgtcgtcgttactgccgaagcgttgggttcgggaagatcatccgctcctccccacaatcgagccgactctcggttctccaagctgatccgccgactcagttcttcctcgtataatcgtctcaatcgttctaccctctccgggctgaggatacctatcgtaccctgtcctgggagatgcatgagactcgtcggtgtcgggccttgcgagggcgcgggcaggtcgtccggcaacgacgtccataacgcctgaagctttgccgatctgatctggggaccttctaaacgacgaaagtcggcgagggagagtcgacggcgtttggctcgttcggaagagtacgccgaggtgttcgaaggaccggcttcgttgtcgtacatggtgccgctcaaaaacaggtctggtggtggtggacctcgcaacgaggcaggtggttcataatccgcaggcctatcagagatccgggtatcgagcagggataatccgtgcgtcttgctcggcctggaccatgcctggtgttgatcggctaacacgtcccgttcgtcgccattgccatcgaacgctttgtcagacgagtcggtgattttgggtctagttgtgtcttcccccttgatactgctgtcctgggtcgacatgtcgatttcatacgagctctatccgtatcaataggttccgagagtagaggcccaagattcgctatcttcggggatcgacgtcgtggatcgatatcggcagaaagaggacttggagtggtgtagtgacggatgagtggtcgatattggattaacctcctggcgattggcggatttattcggtcgcgggggaaggggcgtgctcgagctcgatcaccagctgaccacgactaaggattcaatcaagcggtttgcctcaacaagtcttgggtctgcctttgtgtgttgtatcgcaattgctggacaaccttttgcttatgtctttttctgctgaaccgttgctgctgccgttgttcaggccacgagcgtctcttctatcaaatcgcacaagtaacgactatgccgagacccgtttgcgcttggacaagagcgagccaaccgcgatgatgcgattcgtttgcagaacaaccgacatctcaactggacctagaccatacaaacacacatccacatgtcatgatctacaagatcacgggcgagcttgctcgtcggtttgacggtcgatccgaatcgctcatcaagctagctaccacggtgacaagcacaagctgcgctcggtcaattccagtttaaaacctgcagacagggttatcatcagagcttggactcgaggaagaccgtgacttggcgtcgcagtcggtcaggtacaccggcgactaccgagcaactatcctgtttcgtcgtcatctatcatcatgtatatcgtacaaaggctacagctccacaacacgagcggatctacgacacctcgaaatcctgcaccatgaggatatgcggttctgaaaaggagcgtgacgatggtgtcaacaacaactaccccgtcatcgcacgcgcacgatcggtcactcacggccatcacatataaattcctcgcccacgatatgatagcccatcttctcgtaaaacttgatcgcatggagctgtcaacatgaaaactcgtcagcctgaccccttgacgaatagtaccaggtaagccaacaccgtcactcacctgggcttccaacttgatcgtcaccttcctgctggtccccgcctgttcgatactagacccttgcccaacatgacccttgtgaccttccgcctccacccagtcgtgcacggccttgaccaggatctttcctagtccataccctcgatacggtttcaatacagccagacgtccaagcttttcacccgaatggatcattgtcagtcccgcaatgctcctcaacccgtcacggtccagacggaccgacctttaacgagctcttgacggtccgaatcgtccccgccggtacgcccttctcgccacgcctggcgctctccggatcatcttgcgcgtaaagtacaaagtgcaccgagacgtccttttcgtcgtacttgtccacctcgtcggccatgtcgtaaccctgctcgtccacaaagactgtaccagacgtccgatactcagtgacggtcgcaaagggcggtctcgacacgggatgctcaccttcgaccctgattccgatgcagtccaaccattgcgctcgggttttggcctcgatgaccgtaaagatgggtttctgcggctcttcgctggtaggctcgatcgcgccgtatccagatgcatttcgctccggtcgctcgtccttgctctcctcatccgatggagagcgtgcagctggacgtagggtccatccttgaacgctcgtcaacaggctgaggccgataaagacgatccacacgatgggcatatgagacctagcgctaagactgtagagaaggctgtatgaaacacgttggaaaggacgttggggagtcggcggggcggactttcttattgacaagctagcaaaacgttgctcaccctccaaaggcgggtccgacggcccgtccaaggctcgagcacgagattgcgatcccgttcagagccccgagacatcctttgacgggcgcggaattgttggcaatcactgagagcgatctttctcaagcgggaatgaacacccatcagctatctagcagtccagtcttgctcgaacgggtcagactcacgcccaagccaaatcgcccagagtgtaggtgatcatcagcgggatcatcagagcccacatcttgctcatctcgccgtcgatgacccaaccgtgctcctgacgggccaagacgttcatgacgagtggcaaggcgaacgagatggcccagaatggattgagcgcattgtatagcttgaggactccgagtcgacgttgcaggataggaaggatgcacgcggcaaaagcgatcgagaagaatcccttgaaggcgaacgcttgcgcgatggagctgggtttgatctcgatcccgtagatgtccttgggcgagtagcagaagaggacgaacagcgcgtcgaaacccatactgatgatcgccatcactgcagcatagtccatcagaaagggtcagcgtgacggtctggaagggtgcagcgcgatggactcacggaaaaaggccgcgaggacttgctgtacggcaggatacgagacgagctccatggtcgagatcgaagctggcctcttggcaggagaagcaagcagagctgtgccttcagtgacttgggcgtctgggtcgttcacgcctacaaccgattcatgcgtttcgaggctctgcaagcggatgtctcgtgagcacggtacgggtggcggccagacggggctgtcgctatcgacccacctcttccaagatgagccatgtcgcggctgcagcgagcgatgccatagtagcgatcaatgcgcagggagggaggaacgggtgatcctggaagagcttgatactagcaaactttgatcctgggtattgcctagccggatcggcaagagtcgctcccaagatgggtccaacgatgatagatacgtcccagatgatagtatagaggctggagagaagaagtgagcttggcatctagtgtgcggcgactttcactcgacgtacgggtaaacccagtgttcggcttcaggtggggtgatctcgcctagtgtggctcgaatgaccgaagcgtttccacacaaagctccgcctagagtaaaaaaattcctattggaaatggaacgacagaaaacgagttgacaacccactgagacttaccgaaaaacctagcggccatggtgatataaaagttcttgctcaagccgagagcgagcaccgagatcgcgctacctgccatgcccatcatgatcgccggcctccttccgatcctatcactcagacgaccccactggtaggcgaacaggaagcttcctatcgaaaacgcactctcgatggctcccgagtatttgccaatgtccgactttgccgttgccggtagcagccattcgcacatcgggttgacgtaggcaaagagctgacagatggacagcggttcgactgtccggatgaacatcaacgtgaagagttgcttgtggaaccccgcattacggcgaggtggcgaggtcgtggtcgtcatcgaggttgtgtccagccgtcagtatgtccctcaaaggtttggcaatgctgggatgatgcttcttgctctgtgttcgctgtggtcagtaccggctttgatatatacgcctcaatacatggacgttgttgtatatctatccgatggcaactgtactagatctgaccgagatgactgggttgagcctaaactagaccggcgtccataaggggcagggtgtatgtatgggtgggtatcgacctagaatatgactcgttttagaaaaagattggacgcggccggccactacggtctcgcacgagagcgacatggtcacatcgtaaacagatctggagtcatccccccctcctcctatatcacaacagcaaccaaggacctggatcgagtcatcgcaaaggtcggcaatgctacaagtttccctaacccccaggaagtgatcgactgtacaaagatcgggagaggcgaaagcggctgtagctcgcggaaatacttggacagaatgaccgaccgaccacaacctcggtaataatgagtagggaccgtcggtcaacctggtcaggcgcgatctttcctgtgataccaaagaccattccacaccttgtcactcgcatattatcctcaccaattcattgacagacggtccatcggttcgtgcatactcgcaatcaaatcctgcttccagccgcagccgagggtctggatccataatcaacggatgacaggatcgggaccacctcgaggcggacaatgatgtccgactcttgcgagccacgtttcgctatcccgaacaacgattccgaacggtccgcaggtccagcgggtctatttcgatattcggtatgatgctcggaggtgcactctcggtcagagttcaaggtatgccattatacttgatttgtgaagctgatcacaaatcggcgtggtccgactctacgggtgtccagcccctaccgtccacgccgtggaccgctccgccattcgcgtacgattccgaccccctctctaatcctcctcgacatcgtcttccccatcaccacccttctccacgccgtcctttctggactgcatcttcttcatcttctttctccaccgtttcctctccttgccgtgtagctcggggggcggggtcatcccggtcctctctctagcgggttctgcagcagcaggaggtacggcagacttgggggtatcggcaagaggggttatcggggtgtcggtcgattgggaggagaatatgttattgatcccgggttgaagcgtgggcaatgtcgtcgtgggtgatgcagaggcaggtattttgaaagggttgaacgaggtcgcgagaggctcggcctgggagtccggcttcgctgtcgacggactcggtgatagggactccatcgccggaccgtctagcgatttgggtatcgacgtggaatccttctccgagactaggatcttgtcctttgcgcttgtctgcgccgacagcttggccttgactttccctgtctgcttcttggtcgagaaagcatcccgtgacagcttgttcttcttggtaaccaccctcgtccggctctcctcttcatcatcatcgtcatcactgtggcgactcgcaccattcttgtgaccattaccgacggaagtggaaggctcatcggcatgtctccgcttgagaacgtttgctagcggaagcgtagtcgctgagactaggctcgagccgatcgtctccgggcccgcctttccacccgagatcactttcctatactcccagatttcatgtcagctgaggattcgatatgcgagcagaccgtgatctatgaaagccggctcaccgatgtcgttccgtctgcctcttggcacgattccggtcgataatctcgtcggccgtctccatcgcgctggacgaagccttgtttccgctcgacgctccaaaattccgagggatcatgttgtcgatcatggcagagaattcattgttgaatcgctcgaagctttcgaaatcaggaggtgttgcggtagtcgttgtggacatttcgaagaccgttcgcgtattcggtcgttttatgaattgtcgtcaagtagccgaggtatttccttgaaagggtaccgaagacaagatgcaaagggccccggatatgaggactactattataagaacagggtcaaagacggctctgaagcaagagcactcgagtctgtactccggcgcacatcagacatgacagacggggtttgtgcagagtgtagaaggaaagttcgttcatccagccctatactctgcagtagttgacaggaataacgcataaacaggatttcgggcattttatgcgttttcacaataacccttccggattcgtcaccttgcactaccccatgaacaagtcgtacaggagggtccagctttggctcgttggcataactacggaccagcaacccagcgatagaagaacatcagattggcgaaatacagattggagtcgtcatagtcgaaccaggccctaacgttacgtgcacgcaaataagtcagggctcacacgaggagacgcatttcgaagaggtgatcaacgtgctccggaatttgcgacgaggtggtatggaacccatggcaatctcctatacctctcatgactgtctgatcactctgtctaccgatcgggaggactgggaagacttcgtcgacacgagggaccctgatacgggagaaagtcctcagagtagggaacatacgttggccttgaaagcgatcgatatggggctaggaacgtctatcgagtcggtagacgacctcgcacagaaagctcaaaaggcaggcatagaggcagtccgacgggatggtcgtcgatgggtggctttgaccaaggaggaagtccttgaggagaccgtgtcgagcgaccgggtctagataggtaagccggggtttctcagctagaccgacctcgatcacgcggggctgacctgtcactcgggaagctcctctcttgatctgcaaacgctgaacggcgggatagccagtctcataaatatgccctcgcccccgctctacgaatcgttcggtacgcacatccggctacggtcttgtcacgaaaaggtcaagttcaagttatagaaagaagcctcgggtccggtgattgtatgctgctattccgacttggaatgatttagaacggggatggccgatcgatgtttcatccatgatcttcagaaaagtcacggcacattcgttcatccgtccttccatcgatccatcgacatgcttgcacttaactataccatgtcatgtcgatcagaacgtaggccgtatatactctggtacttctctgccaacccacgttcgactagaacgctcaagataactacgaggggaaggttgccaagcggaccaaagtccgaaacacgcgccaaagagacgaccgcaaaggggcagctacgcaaatgcccggccattgaactttcgctgcgaagctgcgatcgcttgggaagcctcgggaggctgttgtcaagcatgtcgagaggtgttggttgtagtatccagacgatactcgcatgacgctgacgaatcgagtcggaggatcaacgtatggtgaaatcaatcccggtcagcgcgtcctgacggaaaggacacgatgagcaagtccgaggcaattagtcgcaaaggaaagaaaggcacatagaaacggtgcaaacacccatttcggaatgacaatgaaccgctttgttcgatattcctgtccatgctatccaggatgtgcctgagaaaggttgttactccgtgacgaagaatgggtacctcttctagctccttcttggcattccggccacccggtgatcgggatatgaattagaaggatgacgtgatggcgatgcgggagcggtgcacgttgccctcgcctcgtcgatcgggaacccccccataccgaaaattctgcagtcacatgaaagagtttcgtagttacaagaggcttgagagggatgcgaagccaccgacagtcaagggccggggatctcgatcgatggccgcgagggtccctcggctataacctgtggtcgtcgacgcggcgtggcgcgagcgcgagttcaatctaaatatcgcatgaaacacgggatctgtctgatgacgagcactgaggctacgccagcgctaaaacagatctgaatggcggtccgtgccttttctcatcgccatcgggtcagatgatccctctttcgctacgtttcaacgcgtgacacctcggagcgagcaacggtgcgagaccaggtagtgtgaaattgcttcgaactaaagtttcaacccgtcccccgtttatcggccatcggtcgtcgactagtgccaagcacaaaaaagtatcgatcgttgcacgttgcacatcgggcgtgatccacctcgacttaagacctggggctcttgttaagacgacggtgcaggtgagaagttgatcgtggatcaatggtatacaaacgaaggctggtccccttccacgttccccttgccaccgttttgtccaacgttttgttcattttcggatcttttataaaccgccctcctttgatcatcccaagctcgctttacttattggtttgacttcatcatgctcgctctctccatcgtcaccaccttgctcgccagctttgccaccctgagcgccgctgctctcgcccagccttcccgtaagctgattctcgcagtcggtcactctctcgacacgtcggagctgacgacttcgaaatctcaatggcagtggatcagccgggcgatctgaccaccgatctctctcagtacgaaatcggtgcctcccagttcgacaagcgtcagacctcgtgccctcgttacgaggtgatcagcgctcgaggaacaggcgagtctcagtcgttccctcgaggtaatgctgggaccgttcgaggaatcctcgctgccgttcctggtggaaggaactacgaagtcgtgtaggtccaccctgtgctcatcatatacgccgcactgtaagcttatgtagtgcctcttgctttagttacggtgcgaccagcaactttgcgaccggcccttctaccggagccagagacctcatcagccgagttatcaccgttcgtcgtacttgcccgaacacccagttcgttctcgtcggatacagccagggagccatggtggtcgtcaccgccgagaacgatagtggcttgcctcagaattcggtcgccgcggcggtcctttacggaaggtgggcggttcatgtaggtcgtcgacgaagggtagagaaattgacaaagcattcttcatgatgtggaccttctcagcccctactggcagcccaaccgtcccgaggtaggcaacgataacagcatccgtcaaattgtcagatactgacactcgcctcgcgccacatctgatcctttttggaccgcttagaatgctggaagtgctcggagcggacgaggtatcgccgcgttcggcggacgaaacactcctgccgcataccaggccaagactcaagacttctgcaacagtcagtatcaccttcctcgtacctccttagcctacctagatgctcacaccgatacgctgtcgttccgaacagccggggacaacatctgcaccggttctggcagcatcgccgctcaccttggatactctgggtcttcttccgagagcgctgcagtccagttcgccgtacagaaactcaatgccgcgctcggctcgggtggatctacccctaccaaccccaccgatcctcctacctgcacttgctaggcgcttgggcgaaagcttgacgccatgggtcttctgtcgaagttggcggtcctctttctggtaaagaaaagcaagtgtccattttgtttgttgtggagtatttagcatgaagaatacaagactgcccctaaacgatagtatgaacaggcttcccttgaagaaaagccatcgatcaggacatcttgacctggggccacgttgaccgccctacagactcgcaggatggcgtcgatagcaaccatcttacgtccctttgccctgattttggggttggcaggtcatgtttgggtacagttcgctagcgagtgacgtctcaaagtttcggcagggacaggtcacacaaactccgatgagacgccctcctggacattttggcggtcacaatctgtcacattacagaacggtctagctttcccacattgacctccagtccggtttgttgttcaccagcggaacagacctatggctatcggccttaacattcttgttcagggcctgatgttcgaaacgggagcatagaagcactccttgcctgtacgtggccgtcccatgattcatactgtgatacaacttgatacggtgcctacgtgatgtgtctattagccggcacaaccaggacagcttttcaaaatttcatgaatactgtcgaaggagcgttagtcagtgggagtatccgacaggccgagctgcgcgtactcacaataggtcgcaatccatgcaataatctttctgacatgtaggacatctgtcgacagccgtagtatataagagcaaggaccaggttgtccgagtaccatgacagactcacctatatcgtcctgttgccgatacaccttcctctacatgcgatacaccttgctcctctgcgagcgactgacgaaacgaatcgcttggttagacgaaagttgcttttgttgacaagtaggttttgatctcacctctgggaagggcacgtcacatgcgaagcaagctatctgcccctcgtccgtgacatccgattcagatctgaaaatcatccccgtcagacccagtggaaggcggtctttatcgcgcgtactcacattgtcccgtaagcgtgaactgggaagagaaaccagtagctataggcggacgaggacaatattcaacaatcgcttctccgggatcgggaacgttccatcgcgaccgaccttcgtgccaaatgcgggctagagactaccatgagcccgcatacttcgcaatccgttggcacctcacacgctttggcaccgcaccggggacacaagtagcctcctcgtctgatcaacccatgacaggcgcatagtccaaccgctcccggcccagccaagggtaaccgagtagggaaacccatcatcatcagatcggcggggggagctttcgacccccctgatcctcctccggcacccttggtccgccttgctacaccctccatggctgatttcaatccgatcgtcccctgcatcgtcgttgccggcgcttgaaccatctcgaacaagagttcccggtagtgcgcttcgttgagcgccacgccaaactttccctgggtcttctctgtgatcaggcgacagatcttgagttcggcggcgagggcgatgatggacacccggatccgaccggataaaagttttgagagcgtcttgtggatgcttccagggtcggtagtcgtaagggaagagaagaggatgagaacctctaacgaggatgtcgatggcaagtggctgtaatgcgcgatcgttacagtgagacaaacttttcctgtttcgagttggctgggtgacccacttcatgctactccgagccatctccagaccgttctgcaagctcggttcgccactcggttccaacttgcgtttatccgcgatggctgccaaaatcgcatgtggattccctgccccgttcagactttatgttgagcaccaccacgattcgacttttacctagagacagagccgactcacctcccatctcgatgatcatctcgcccagcccgttccttaagccgatgatcccgatctatgagctcatttagaagctttagccaggccggtgcgagggggtcaggaacctcttcgccgagctcacctgtccgagcgggttctgatcgaaccattccatgacgaaacctctcaagtactgtaatgtcaggtcccacctggaagaggccaacgtcccggattcaccacggccgtgctcagtaagatgtacctcaataagatactggagacgatccgtgctcacctggtcggccgcatgtccttgtcgttcatgctgatactcaggtcgagcaaaatgtacatatgtcggatgatagatcgtctcagagagctctgtgatgtttgtgccctggaaataccgcaagcacaggcgatcagatggcaaggtatgggttgggaaagggagaccacaaaccttcgtcgccgaccacgcatcatcaggccttctacagccgcttgcaagcctccactctcgtcttcctgcacagcgtcccatgatcgattgtacgatgcttcccatgcgtacgattgctacgagccgagtcggtgcaggtcgagtcgcaactgagagtcagctcgacagcgttgcaagtccatcgggcggaaatgacttacatccccgacctttcgtttcttgccacccttttccgccatccccgtagcaaaatcctcctcttcctcttcttcctcctgctgcccgtctacctgcatggcttcttcgaccccgcctgcagacccattttgagtgactgccggcgttccaccccgactggcctccccgcccgagcccgtctgttcctgattcttcgcggccgaccggtcgttcaatccagagatgatcgcctggcctttagccttgctctgagcgttgaacgctaccctgggtccgttggtctggaccgctcgacctgggggtagctggttggatttcgaatgtcggggtgcgtcgtctggttcggaatctgaagacgagacgatggcacgggtcttgcccttttgagcacgactgggcccggtcggggcgtccgaatcgtccgagtccatagtacaagctgtctgtagctctaacagacgagttaatctggatgatctgactgtgtaaggtagctaggatagtcggtctcatggtcgacatgagtttagctcgagttgatattgtcccctctcgttcgttcaaagtcgcgcgtaagagatcgatcgacatcgactcaacacatggacaacgacgacgacatggacgtcttcttgggtgtcaatcatgcattgctactaccgctctttgatcatattgatactgcactaccagtcagactgatctcttatacaaggaaaaacaaaacccactcgggcccatcccaacccgtcctacaccgcgcctacccgttcacgcgtacaactcctcaagaacctcgagctatcctctctacttatctaaagaccaaagaaaggaccacgctcccgatacgagagatacgaagccgcacgcgctctacctccgacgtttgagtagcccggcgatgaggatccctccgactgcagctgcaccggcgacgagcccgatacctgaacacacgcgggaacgaaacgatgagcgaaatcagctcgatgttcgtccacatccacgttggcgtccgcgtcccgcctctctctcatcgcggggaacaagaccaagtgaagccccatagagagaaaggagcactcggggggacgtgtgcatgtggtcatgtgcgtgtgtggatggactcaccgatatatccttccttggtctcagcggtatcgatcagccctttcaggctctgcgcttgtcggttactaggttccacgtggagcaacaggtctgtcggggttcgaacaaggatgatcgggtcgggtcgggttcaaggcaggcgggagaacaaggttaatcagcgagtggtacggggatcgattgacctccctagcccttatttcgcccagagatagttgtgggcaggtagagtacggcacgacagctggtactgccaggtatgggcaggagtgagtacgtaccgttgaactttctggccatcccatagttcccgagcttgtaataccccagagcgatatagtatgaacattctctccggtattcaggggcggtctgatagatctctgtcaggtcgagcgggttgggattttcggttggagggagagcaacgggtccgcggaggcgaggatgggtgagggcgggcgggtgatgatgcgggttgtatggtagatagcgagggatgagtccgcgtacagtatcaagcccagccgacaaatcgtacacaagcgagagaagatagaacacacgagatcagcacgggtcggatgggcggcgagtacatggagagtagtcctcgtgtctctgagcgtaccttgtagcaacttgatcccttccgtctgcaactctctcttgggagatttcaccattccccatgctgcatcgtcgtgaaaccagagtcgagaggaaagagagacgacgaggagacggaagattgcatgatcagcacggacgggggcgaacaaggtggacgggcgggaaaggttgtcgtcggctcaccataattgaatttggtctgcgtggagacatgttgctgttcctgttccttctggtactgagtcctcaagacctgtgtgatcgatcgtggcccagagaagaaaggtgtgcaggagaaagggtcagctctcgtctgaagcgactgcgatatgttttctgggccgagatgacgcggcgaggtgaggcaggctgacctcgagttcgtcgaaagcgagactttcttgtgcgtctgctgcgtagggtaaatctgtaggcatcttgaggagtgtttgatcgagtgagatgtttgggttgaggaggggattcaacgataatagaataattcaatatagaaatgtaacatccaatacctagtagctagcatacctagtagcttacccgatgacctcacaagtcaaatctcggaagcaaaaagaggcaagtgggccactatcatggtagagtagtgtatgtaggtcatgggggtatggtcatggtatcgtatggtaatcaaagctcaaccatcacatcatcttcattcaggactcacaacaagtaaccaggtagcgagctacacaaacatacgggatcgattgtgccaacgatcgggaaccatgtcactcacgactacgacgtatatcattacccgcgagtgaacgttgcgaccaccaacattctcggacggctggcgacatcgtcaacccccaacttttctatcgataagagtcggatctttcacaagagatctcaaggtcaaactgaacacaaagtcgaacagtaagttcttggtcggaacaggctcgcaacgaacgaaccttgaacaggaaagccatcggacaaaacgtcatcatccctttgaacgcctcttgaccgtatcgtaacgatctctgaagcacatacatccaatctcctcgtcgcaacagggtcgggaatctgacccaccgaggaccttgttcttcggacatagctatggagaaattaaaaaacgacacgaccatcatctcggaaaagtcctacgggatcagcccgcccggaattcaggcggaatctttcgagatgactgacccgtctcatcctccaacatcacctcgaccggccaccctgcataccccgagatcgacctcgttcatctcctttcctacacaaccaccaccaccaacagacgaactcgatgtggaccctaccggtcgggggaaatcgtgccgcccacccgcacctaccgggaaatcccggtcagcccgaccgagcagcaggagtcgagctagggaagcactggctgaaggtctgggtacgttatggaacatgatcaaacctccggagatgcccgaggatacgatggagatgatcgacgtcgaggaagacgagggagggcgcacggggatggctagcaggcctaacgacggggacgagctcggtcgggctcgggctgatcatcccgcagcaagaggcaaggattcgaaattgctcttggagaggacgagatcgaggacggcttctgcgattgggaatgggtttcatcggatccggacgaggacgaagagtgggcgggattccgtccgcgctgggtacatgcgcagggccgagagcgagagggatctgacgagcgggtcgataggggaaaaatctgcagggagagaagtcaggtgtgtggtggtagataacgatgtctggaaggaggacgagatggatgcagacgagggcaacgtcgaggacgggatgatcgaggggaggacatcgttgcagagcgatcgccatcatcagcatcagcatggtcattcacatcatcatcatcatcaccaccaccaccattcgcacccgacgcacggagagtcgggggaacatgcctgggcgacgggatcctatacagagtgtgggagacgaccctcggtatcgtcttcgacgggcactctccgtcgatggctcatgtgcgtgacccactctctacaagactttttcgcgacccgtttcgaggacccagagagggagacgcattacctgcaagaagcgtgggtttccctccgacagagcgccatgccgacgagtttgctatacatcctcgcttgggggctcacctggggtctctcgggtcggccgcttccggtttacaatcggtgggcgttcatattcgccaacgggttcctgtcggtacccttgccgttcttcgtcatgatggacctcatgcgacgaataccctggctctatcaatgttgggtcctcctcgccagctgggcgtttgcttatgccgtcctcgtcgacatgcacgtctgtgggtactatacaggatacgcggaccaatgcgtcaacagtcccaattttatcgcactcttcttctggtccatcgccctgccagtattcgggctgctcgggctcggtcagaaacggctcttccatctgatcggcctcgtcatctggtgcgcgctcaccatatcgctcatcatcgtccccggagctcccaacttgatgatcaggaacctcatcctcttgatctcgctgcacgtctttctcgtcgtcatgagttacttttgggaaaagtcgagcaggagaatgttcacgctcagagcgcagatcaaggatcaatacatgaagaccgagatggcgagacgggccgaagcgctggcgaatcagagttcgagaaagtttatcgcatatgtgtttcacgaggtcggtccgactgcacttcccgcatatcgaaagggagaaggaaagctgatgacgtgtctttacgggttcggcagatccgcggtcccttgaaccggtgcacgttgaactttggcttgttcgtcgacgagcacgtccgagaggtcgatccggaaaagcaagagatggtcacgagcgtcaacaacgatttccaactcatgtctcgggtgctcaacgacgtactgtccctggatcgcattcgtctcgggtttctggagccgtccgtcgaaccgttcaggttggaccggaccgtcagcttggccgtcagcgggttccggtcgcaagccgacgccctcggtttgcacctcgaattggaatccgatccaaagatctcggacctcgtattgatgggcgatgccggtcggatccagcaactcgtcggaaatctgatcggaaacagtctcaagtttacaaaacaaggcggggtgaccattgtcactcgtttgctaggtatcgtaggacacaatccacctgccgccacggacacgaccacgcccaccgaacccgatatcatcgccccgatcctgctccccaccgaagtctccgatggacccgactcgatccccgaaatctcgtcgaagcgcccgtcctacagccccaccgcgagctcggcctcttcttgtcgttcgagatctcgaccgaccagcgtccgacctgcacgcaaccgcgccgtcgtgcggatcgaagtccgagatacgggcgtcgggttcagcgcgcaggatgtggatgagaacaggttgttctcagagtatcgtcagaccaagattggcatgaaacagggcgcttcgggcagcggactcgggctcgcgctgtgtcgcaaatttgtcgaagttttccagggccgcttgggggtctacagcgagccagggaaagggtcgacgttttggtacgtgcgacttggactcgtgacgattggatgacacgtcccatattgatccgatttgggggcacatcaggttcgagattccatttccaatccacagtgtggtagtcaaagaagaggctccagttatggaagccgaggaagaaatcttgcctttaaagagcgagtcgcgcgagatatcggcggcctcgtctgtagatccgatagctccaatcggcaagtaacggttggtcccgaccatccgcaccctgttcactaacgtcgatcgattatacgtgctgtacagcagcttccgccccttccgtcgagtcacctactctacctctgaccagacccgctctcatatcgaccgctgtgaagccgcaggacgtctcgtccatcccgacgacctccggaacgagcaaaccagtgatcgcaccggaagatgatcctctcagccttgattgtctcgtcgtagacgactgcccgtgagtccgaatctcgacgtcagggtcgtggtgatatcctcagctcatcgtcagtatctgggttcaacttccctcttccttcgccatggcgagatagtatgacccggacgttgatgaccaagattttaagacggatgggtcatcgggtcaaccaggcagaggatggggtccccgcgctacagatgattcgggagagggagacgggcacgccaggtgaagggtacgggtacgacgtcgtcttcctggacaagtgagtcgcccggcgtcctgtcccccatttccatccaggcctctggggcgagggtggtatgacgatcttcccttccctcggctgacgcactgggtttgaaacgatcgacgtacagtatgatgccggtcatgaccggagaagaggccgtcaggaagcttcgaagacgagggtgcaaagtgtttgtggttggtgctacggggaacgctttgaaaggtcagtggagattctagatgagaatctctcccgtcactcggtctgaccgaacgaggctgatctgaaaacccttttatgtgcattttcgctgatgaccacgacgacgacgacgacgatgacgaggatagaggaccaagatgcctacgtcgccgctggagtggacgagatcctcacgaaaccggtctttgcggacaagatcagacgggtcgtagggatcgcgctcgagaggaaaaagacgaggatgagcggcaaggtcaagcagggtgcagccgaggacaatgtgggcgggggtgagggtggcggtggtggtgatggtggaacggcaggtataccaggtggacgttaggtaggaagacgacagagttggcgtggggggatgggatgggattccccccggtaataaatggcggcggctcgatcatccaaactgtatcagtaataatcttcttcttcaaccttgatgactcgcaagccgtatgtacgcgtgcatctctctactcgctcttgggaaacccgacgttgtaacaatttatatcacgaaccgaccgtccaacccgtagggctcttggcacgtttcatccatatataccctttgtgcccgtacgtacgtcgtgggatcatagacacgagaacaccggtcgacgagatgatcgaaagggggtctggctcacgtgattgttttgagggatgatgatcaccgagcggcacaggcgggggggttccggcgatgcggcggtatgggaatctccgagggtcgggccagaggaggggaagggggggtgtaagcgtggcaggaaggggtagaggggtcgggctcggagccaggggaagaggtgagtcgtcgggatgttcttgacgagtcgtccttcgcatactcgctaacggtcgactcgactcgatggactctcggtctcgcgtctcccagtggtcagcgggacacgaccgacatctacgacgacgacgggtagcacgatcggttcgggcactgggctacggaaaccgtcgggtacggtgactaggcggtgaatgtgcgatgtagcgatctgggatgtactggggacaacggatacgagacgaatccgaacgaccacgaaacgtctgagtgtggtcttgactggtgccgatgtaagcgcttcacgagcgagccgcgtggcctaacggattaagcccatcgtcggcagttgccttgggccaagtttcataccccccatcgtgatctattgcgtccctgtcaccgtaacgtatctgccgaagccctccaatcgatagccaaagaatgatgtgcaaagacgtctacagctcagcgtttgcgatacaatgattgatgggatacagtgggcggaaacggatcccccttgcgtcagacgcgccatacttgaaagatctctggaaccgacatggttcccttgcgccacggctcgagctggacatcttcctgctctgcaaagacctgcatcggaagcgcttgcgcgtgtgggtcgggcgggtctatgcgaatccaacctcgcgcccgttcctcgatcacctcggcggtcaaggtctttttacgccgtaccatgaagatccgattgaagaacccgatctgagcgagacgaggtcccgccgctcgagcaatgagctggatgtcttccatactgaacagggtgtcgttcgacgtcgagtgtgtctcgggcgctatctggagatgaaacacccggagattgggtagcttgccgagaaactttgcgatccgttgaggctgtcgtccggagtgccccagcgtcaattgatgtttggctctgatcagagacgacacgactcacgggatactttgttgggggcagcctgatcatcaacgtctctagtcccgacaatcgatcggcgataaaagcgagatcccgaaagtcaacgattaggtgggacagccacagacgctccagaccatacggccagagctcggcgatattggtcaatcttccgctcgcctcgatgctccgctggtaatccaacgtgtttcgctcccttgacaacaagagccattccaagcgttcaggcaaaaaggacgtctccccaagttgggacagatcgcggtctttcctttcgatcgaggccaggctgaagccaaaaggtccatgtcgagcgagtgccctctcgacgtacaattgttcccgtcgactatcgtccgctaggagcagacgtagaaagaccgtctcggtaacaaagagtctcttgagacgtagcaaacggatcccgacagtcttggacgattctctctccaggtacaaatcttcgtccaattgatcctcttcatcgccctagggaaagcgcactaccatcaacatccacgatcatgtgcgatgcggtcacactcgctcacatgggtgacgccctctagtccgagttcctcgaggttcgcaccggccgttcgaagcacggcaaaatacccacgaggcgtgacgtggccgcatccgaacaacttgaaggccttgaggttgcggagatgcaggctcagcttgatcatgaacccgtcgtcgatgaacttggtgtcctgtgaggtccctcatcatcaaccattcgtgagcggtggttcggatagatctgaacccgggtcgacggatcggactgaccctagtgataatctcgaaggattccaacgtatgcccgtcctcctcgtcccacctcttgagaatctctgggagggcattcaccatggcccgatcgggtgtatgcagcttgaggtccctcatgccccggagattgctcagcagccaagcgtctctcgagcccaaggtgtgaccgttgatctcgagcttgacgagcttggtcagcttggccagcgtcttcaaatggtcgcttgtcagactacgatcccgggtccatgtcaggtgggtgagagacacgaggttggtgagcgctcggttgcatgtcgtaggccaatcgtgagagctcgcgagggggtagtagatgacgtccagccgttcgacgagggcggcgatctcggttgattgagatagagtgcgaaagaggccgtcgaactgcggaagacaagaaatgtggcgcaagtatggtcagcaaaaattgggggcgggtctgccacaacctacggggcagtcctaccttgcgctcaggtgtggcttcccctgcgagtcggttacgggtacattatcagcatcgttatcgtctttcggcagatcaactgtcggcctgctgcaaagctccttacaaggtcgcacccagacatgcttatagagtttcttcctggcgagatccaacaaccctagatatgctcatcgtcccggtcagcgggggttgggtcggacgagaacctcgtcagagacgtcgactcgcctcggtcaacggcacacaaggcggccaagctcgataggtcgtcgatgtactccaagatcgggagatagagctccactgggagcgtcgtatgcatcgacatgagagcatgcgtgttgatacatgggtatattgacgagcagaaagcacagaggacgacttagaatttgtgagtcgcaagtcgttcggggttgagagcgagttgcggagttgatcgttgatgacgttttgttgacaaagtcgcgatcgagatgaggaatgatatgaaaccctcacgtacaatccgtatcatattggcacaggttcgatacgactttattcgcagctcccgtcgtccatcatatggccgtgccggtggtggccgcttctactcctgctccgtcgggtacgagtagtgacgtggatctcctgctacgtgcacttgtctcgggggacaatgagggtataaatatcatgattgcagtacggtgctcgtttcggtggttcgtctaaggctgttcatatatacgcatccgctcgggcggatctctacctatcctctccgtcgtcatagccacggcatgtaccgcgctctccgctcttcgccaatcttttcacctacccagatttggagggtctttaccgggttccctgtccccttttgcttgaaccagacgagtcctgccagggcgatcccgtagcctacgaatgatatcattagcatgatcgtaggagaacgccgaggtgcaggctggctgtatcgctcacctagaatttgtgtggtcgtcattacggagtgcaggataatgaccgacatgacgatcaagatgatgtcctgcagagacgacgaccacgaatcggaatcggtcgatatcagcttctgatccgtctcgcgggagaggagaatgaggacatgtgcgatggcttaccttgagcaccccggacaaggtcaacaccaagctcccggccgaatggatcaagtagactcctgcgacgttgagagcgaatgccagtcctccactgagcgcgaggacggggatgccgacgttgggcagatcgtcatacgccgcgctgccttccatcaagggttgcaaaaaggcgatcatgacgaaacatagctgcagaaaagggtgtgagtgaccatcggactaggtgcggttacggtacgaccgagagaacgcgaagggagctcataggtggggccacttaccggcgcgacgagatagacgaggaccaagggcgaggtctttcggttaccgatcaacaattgcaccgcgaccaacctggccgattcgacctgacgccgtcggagaagggtaacttcattcagtacaaaggacaagggggaacgtattctccgggaaagtggactcacgacgacggcgagaacttggcagacgaacccgaacattgagaacttcaactcgcctagggcggcgatcacgcacccggtactgatcatcccgaggatgagagcgatcgtcccgtccatctctgccaatccgatggcgtacgacatgagatgcacgacgacggggatgaaagcctgggccatgtaccggtatggaacattaattgatcagcgcttgatgagagccgggagacgcaccccaggggaaagcgtggacctaccttgagcatctggacgaagctgacgctgaggtagacgtaggccgtgttactcagtactaaagaagcggaaaacaagacgcctaatggcaagatggcggtcgtatacgtctgcaactgtaagacccaagcaacacgacatgagcttgatgcgtacacgtggagcatgccacgcgggatgatggcgggtgaggctcacagagacaggctggcgattgatctggtccatgaggttggtcgtatacctgaggacctgtgttccacccgtctacaagaggaaccaaacgaaagcattcgaccaggtcagtctggggtcgggtctcaagacacgttgaggaacaggacgacctcgaccatgtgcgcgaacactcaccgctacagccatatggaacgccgtcaggaagacgggctgcgccgataagaagaaaagacaatttcgtctccatcttagtatcaccaaacgaagagagaggagaacgaaacaaatccggtgaagggggctcacgtaaggaaaatgcaaggtcgtaaaaatgtgcttgttgaggatgatcaccgagctgctgagcgtgagctgagaggtgaaaagaagaagcgggggggagcaggacgaggtcagtctgactgcagcgagaaaagggagatttgcagactcacccaaagaggaactgtggagccggttcgcggatttcgagcgagaaagtcagcggggctcgctcgcgctgtagcatatctacacgattctgttgggtggttctgaaatgcactcactcatgatccatggtgagattttggccggttgttgtaattgtagatcttcactctctcttcttcgacccatgacttccttcaatccttccaggtcgacatcctccctgacccctcctcctgccctctcattcccacccatcggctcgaccccgatacctcggtagatcaacggttcattctgttcggcatccctcaacgtcgccgtggatgatgaggtcgaggatgtccgacggagatcgagcgagatgtgttctgtcatgtcattatcgtcaaaggatcctcgtcctccatgttcgcgttttgtgttggtgttgagggcggtcgcgtccatgacgagcgtcgagtgtttgctctcacagttgcatgtgctagtagctaatagtccacgctgccgctgccggtgtttctggtttgactttggggatgctggttaggtagtcactagttgctagttgagaaacaaggacgatgttatggatatgatgctgttctgattgattgacctgtgcgcttttgccaaaagctgcaccaccatgtccacaaccatccaacccataagattgtgtgaattgtgggtgatgtgatgccctgctttctcggtttccaacgaattcgattttgattccgcactttcgcttcctccttccaccccgaccttcctccccacgccgtgcccttccttactgcgctgctgttgtgccctgtgatgttcggccctgaaaagccatcattcgcatcattcggcaatggcttgtgccgtcctacgccaccccgtccgtcgtacacgacattcctctcgttctacacctctcggcttctcgcctgtcgcggagccggcaacgaccgtcttgcaacacagcccttacacgtacacacacacacacacccatatacacacaccccgcgccttcggtagctcagaaggaccgattcggggatgttcgaccgaatcgcacactgcgtgctatttgcacgcgcttgaaattagttcgaccacaagaattgcgcaacggacgctttccagaatacctcttgctgaattgctgatcgctggtaatcgataaagaggaagtggggtctgccttggacccttccgatcctcgcgcgtggagcaagaacaagaatggtcaaagaggatctccgattccaagcggggtctgatgtatatatatgttggttgtatagatcatcaaacgcttcccctctcccgcaccatcccgatcgcgtgccgatacatcgttcagtccctaacgcatcgacccgttctcgggcatcgacatcgtcgtcatcgtcatcctcgtcgatccgtttatgcctcctcggtacggagacgggcggcggcgttggtgaccctagacaggcaaaggacaatgtcagcacaatggcgcgcatcatccgcgaatcatgtcgtccaccctgccactcacttgacgttcaaaaccttggcacgggccaagatctcgatcctcttcttggaagagacgttgtgggcgatggtagcggcgtacttgttggtgtgcatcaacaagagctccaactgtagaagaaggacatgtatacggaatcagctggctgtctcttgggccttgtcccctcatcgatagccgggttgtgaagacgactgtcatcgacccatttgtctcaactgtgacactcacgtccttgaggttggagacgacgaccgacttcaaaccgttgggcatcatgtgcttggtcttcttgttcgatccgtatccaatcttgggcatgggggtctgacccgagaaccttcgtcggactcggttgtcaatacctgcgagtcatcaacgagcacggagattgaccagcccgatactttgtcagcgtccacaaccgcattgatgatttggcttgttacgccgaagaatagtgcaagagccaaacgcacccttaggcttcctccatgactccttgacaccgtggtatcggtcagactggtgcctcttgaagaccttggttcgcttcttgacgatgggaatggaagaggccatttctacataatgaaagagagacagtcagaaaagcgtccctcgagaaaggtgggatcgaggtcggtcgtcccaggcggtcggtcgagcaggaaagctcgaggtctaggtctaggtctggggttgaggtaggtggcagataggtagcagataggtgggttgtcgggtgtccttgccacacgtttgatccgaggcagcgctctgtttccatgttggtacggcaatatgctggcaatatgctggcaattatgctggcggtcctcctggaagctacgacatggcttccgtatgacttgtgttgacgacaagcctctaactccgacagggcattgcgctacaaccatcccctctcttgcccgctcacgccacatgtcgagatagtcgtcaagaccccctatacgtctgcatctcaggccatccgagtcgtccttagtcggtgattatcgaagagctgttccaccgtgtatcgcctcgacctccagacctagacctgttccccgtgcctttgcgaccgatcgaccgcgaccgatcatacgaccgaagtgtatactcacttgctgatgtcgaccgtttgatttgtctcttccaaggggtgatcagagatgtcaagatggattgaacgtgcgatatggtgatctcaacttgacaggtcgttcgaggtcgagctcagaggggccggcgcgaggaaggattgagtgaggagcagggcaagggggggaagcaggggacgggggagaagtgaactaagcgcattttttttgggtcgccaatcggcgctttctcacgagaacgcgcttttacttgggacgcgcacgcgcgttcagttgaagaaaggtcgatccgcgtgttactctctgtctctccttgtctctcctgttaggactctgtttcggattgcgcgagcgaggatggcgtgtttgaggtggcctgattgactgagagcttaccggcaagcgatgcactttacctaacatacaaggagcctccctttttcctttcccagtggtctactacgacatccagggaaggatgttctgacttcgatgctatatccctatgtccctcgccatcttccacattagcttgtcgatgaagcgcttaagcttatctagcgaagacaagcccatatctgtgccatccggacgagtcaggacaggcgagattcgcatcgtagacatgaacacgggaggaaaggagcaatcttgattcaaccggaactttctgctatgctcgtcgcatgactcgcaagaacagtaacgcgaaagcacagattccccttctaacacatcatcaccgggattcagacattacaagcacggtctcggtcacccttaggaacaggctaaattggacccattgtatttcctgtcggttagcagcattggtctcgcaatgtgcatgatcatcggactggcggtgagaaagacagcttgcatctcgggctatcgcgtgtcgagcgatacatgatccacatttctgtacctatcaaccggaccttcggcactccaagggttttgattcgtagccgatcatgattgtccacacaacatgggtatatgacgagatcttatatcgacgttcctcgaaccgacgcgcttgtcgagatcttcctggtcaattgcaccgctccatagatataatcggtcagtgcggagtgtgcaaccgagaaagcagcctcgacgccatggccagggatcggacgacaattcagtcgagttgtagaaccgagtttggccaggcagattaaagcgcgacctgagctacaattgtactgggagccgagtacatcaggcgattgacggcttgacaacccgaccggtttttacctctaggcgacatccctgagtgccgatgccctcatcttttagccgccaatgtgcatagagaggtttcctagttgccaccagaacaatcgaagatgagcagcgttggcgtctcgttcctttcgttagttgcgacgatctcaggtttacggtcagccaatttgaaactgcttccataggcatagctccatggcacatggcccttcaagtgatgggctacatcactacgaaacgaaattcccgtccaaacgagtcgcgatgcgcagtagacatatcgagactgcggtcgtggccccaggtccagatagagcagtcgtacgctcctcgggacgctaggggcaggggaaacgccacggttcgcgaccgactaacccggaagattttccgtctctactgcggccgtgtcggtgagataccgtatggagctggtttcagacactttatcgtgcaaccaaggcaagatccaggcgacgtcgacgatctgcttttgattccaagatggacttgcgagttcataccccgcacaagtatgaggctaggctaggcttgacggaagcagaccgcgcggaccctgggccctcccatcctcaccaccggctaggctcggtcgacgtcgatcaccatgcaccatgtcatcggaagctgagagcaaccaaggaaagcatcgcagatgtcgccatttcagccaagccaagagacatgtttgcactatacttgaggctgccgagaatgagaaggcaacacaatggaagggtgtatcatatcgatatgatggtcatcgctgcgccgggtacgcgcccttcgttcgcagcatagcttttactgcgccgcgtgacgtttgacgtgacgtcattttctgattggctagggtgtgacccgcaggaggaggcgggggaaggggggctgaccggcgctgacccttgtgcttgattgtatatatcaaggacagtcccagactacgcctctcatcatcttgcatcttgatcatattaagtgcttcttctcctttacctcgtaaacatcattcattgtccatcttgttcttcctcggaaacctcctactagaacccaccaatctcaatcacctcattcaatcaacaccatgtcagtatcattttgccccgggtcaaacaggctagcgggatggcgtctcgacagaatttctcgtcgagacgtgttttcactcattgacttgtcatgcaagatcccgactgacccgcttcgtctccctgcatctccctcacttacagggctttcaccggaagtgatatcttgaagatcatctgtaagtacagtgaacctgatttgccccagacccggcccgtgtcgcacgtctttgctgatcacctcatctgatccgattcgatagtggccatctttgttcctcctcttggagtgttcatgtgagcaatcgtgtctttcgccacatatgagacgacaggactgccccgtcggaacaaactgggttacggtggacacccgctgaccttcgcccttccgcatcgtttccttccagcgagcgtggatgcaacgccgacttcttcatgtgcgtatcaccttattcggaagacgtcccccccgcacaagagtgactgaccttgtctcgtctcgatctcgcagcaacatcttgttgaccatcttgggttagaatcgggctcttaccattcagactcggcagaggacgaagtgctgacgtatcctgctttgcttcctcttcatgcacctcgatacatataggttacattcccggtatcattgtgagtcttgccacacgaaccaggtcacaccgctatcgtaacaggttcgctgacgttcactactctcccagcacgccttgtacatcatcctaaaatattaggaccgtcatgtctagtgatcgaccgggccttcttcccggttgacggcaagatgcgcagaacgtgaaggaggacgaggtcgacaagtcgtcctcggaagagtaatttggaatacacgacggatcgtcaaccctctagggtcggctttccccacctttcttccctctcgagagattcccaaatgtaaatcgcgcgaaccatccgagcgctcgcaaacaatatataattcgagtctttctgttcaactcggtgattgctgtttacctttcgatatcacagtcccatggtggattgactggatcagcggagtagacgacgtttgccgagagggacgtcgacgtttaaccgatcgttcccgggtgggaattttaccgtgacgtcatgcgttttaacccgaaaatggccgctcgattcgcgtcagccagcccaccaaaggccagcgaatagggggaacatttagattcgtcgacgattgatcactcttttaaattggttcactggacatccacccgtcatatagatcttcttctacaacatacattcattccgaccacactaactctctcacaatgttccgaaccgctctccgaacctctgctggcgccgccttccgccaacgagccgtcgctcgtcgttacgcttcgtcccactcgtcgtcggctcccgctggagatgccacctgggctatgggcagtgccgccgtctttggttcgatcaccgcttacctcttgatgtccggcggacaacctgccgaggctgccgttcactcgaccaccaacatgaagattgccgacgcaaccgagaagaaagtcacccccgaggatgctcccaccttggtcagtctgcgtatccgctcgtctgactcttcatggtcgtataccgagctgacgccgagtacctggcgttgaaatatggtatagaccaacaccgctgctgaatccgttcacaagggatccggtcgtgcgatcaagagcatcgaggtgcgtccaccatttcatccttgtgctacgtcatctcctactcacgcccttgcgccgtgctctatcgtgatgtttcgctgcacagggcgaaaagaccgacgacgactcgagcgaggacaaggaggaagaatcctctgcgcctgcgccggccgaggacaaggacgatcagagcgccgagtctagcgagcccgctgagggtcgaaaggccgaggacattcccgagtccgagatctccagcaagaccgctcaggacagcttgaagcaggccgaggtacgttcagcccgtccgaggatcaatcgctcgagtccaagtcaagatgggtctggtctgacgttttgaacgcatctttcgcgcacagtctgtcagcgtgccccgatcggccatgggtaacaatgctgaaggctcgaacggctccagctcgagctctgacggcaagatggaagctgccgatgagggtcgactggccgaggatattcccgcttccgagatcgaaaactccttgcacaaggccgaggtcagtcggcggtcgagaggagggtcaagtcgtgtggtatgcaagctgatgaatccgcctcccgactgttctaggaggcatgcgtacctaacgccacctgggctggtggtgaaaaggccgagtagatctaggccagcagcagaaccatctaatatcgcatgtaaaccaaacctcgacatgaaaacaatatcaaagttaccaagctatcgcagccgatcgccctgatcgaggcggcaggaccgggccggccaacttgcaggcgcttcaagctctcgcccttctcctcatcaagcccgtcctttgcccttgcccaggggtcggcctttaccctgagctccactcactttccatgcgctcaggatggcctctttgatctcttgaactccgtcatcgtgccggatcgaagcgaagattgtaggaccaccctcccgcatcatcgcagcgtcccgtttcatcacgtcgagcgaggctccgacatagggtgcgaggtcgatctgaacagaggatggggcgtatctgttagcgtcgccgaggctccgggttcggtatcggattgactgcttgggactgactttgttcacgatgaggaggtcggactgggtgaggaagcacaagcgatgttcagctaagcggcttgcgatatggattgtcccgccggactcacctgcgagataccgggtccacctttacgtggcaccttgtcgcccccgctgacgtcaatctagtatcgcagagaggtcggctgtttgctcttgtcatttacgacaggcaccacgcctggcatacttacgacgtagataatatagtcagccagttctctcgaatagtttgctatggcatgacatccataattgatcagcacgaatggacaccctgcatcaaatttctagatcagcgggacttacctgccaggttatctccaccactctcgacgaataacaactcggtctcgtaaatcccttgcagctcttccaatgcatgcatgttggcagagatgtcttcccgaatggctgcgtgaggacaaccacctatttcacgccgagcacaagatcagcccgcgtctctcgcgttgatcttgacaaatgacctacccgtctcgacggccctgactcgaccttgatcttcgagcgcattgttcctgatcaagaactcttgatcttcctaccatggccaaatcgacatgatcgtatgtagcatgaaacatggggtcagggtcgcgcgagaatagttggtccgataattagccgatggcggtcttgtttatctcgatagacggaacaggacgggccgatacggccgagaagggaaacgaacctttgtaaaaatgtcgttggtaaccacggctagtgggcgggaaaataagggcgagaatggtcaatgtcgagctccccaccctcatcagcacaagagcaagcagagacttaccgatgttgaactcgtctcggaaggctcgacacagtgccaagagcaacgccgtctttcccgaaccgacaggtctgaacggagccgctaagttcgagttggactgctttgcagctccgcagcaacagacttacccgccgataccgatggtgaaagctcgctcctcaaagtctctgttcgaaaagtcgggcatgttgcgttccgagtatttgcctagagatccagattccagtcaactacttttcgaggcttcgtcatttgcgcggaaactcctgccacgacacctacctgggttttccaaatgctcatgcgtatgaccgtgctcgaccggtgtccaggtcccggtcgctgcatcatgaagatgagctagggcgccattcccgtgctcgtgcccatgtccatgcccattatggtggtcgaattcgggtcgcgaaccggccgcgagtagggcggtcgagagtcggtcttgaaactgaactttttgcgccatgatctgatgctattgtcaggtagtgcggcctataagctatgtgggtgtgtagagttgccggcaagacttgaacgatttgacctggacgattgttgattcgtgctcgtcgacaactctccaaccgaccgaccgaccaaacctgttgctcttgctaatcaacctcctccccccgcgaagccgggtcttgtctcgcttggaacgcgccgatccgatccgaatttgcttccgcagaggatccaccggactcggcatcgtaccagcagatagcggggccaggggtctccaatcgttcagccagggggggcctcagtgaacatcaaaacagagccgcagcggtatcatgctcgtcgttatgttcatctagatgtacactttccataagctctgtctagcgaggcaaagatgctatatgctgcgttaccccttgattccctatcaattacaaccaggataacccggtacactgcgccctcttcatctcacatcaactccctagtgcctactatctagcctcttgttgacggcatcgatgtgcttccggttcttcatgtgaatctcgagattggaaggctcgcaagagtagaccttgcccggactattcaactatctcatattagtgcctagtgaccccctttcgaacgaagcgaatcgactgaccaatcgagacatttcattttccaatgcgtgcgttcgtcgcccgaggcgttcggccgatatacgggatccagacgatcatgcggcctcgtctgcttgaaatgcatcaagacctctttgacccactcgggcagtggtggcatctgatgtccgggaccatcaaatcccgcgggtaagccaggttgacaggcaagatcgacaaccgaccgtactcacactaccagacgtcacacgctgcaaggccatgcccggtctcgatggtgtcatcggtacgcgaggcgattggacctcactcggtttaggtacgacgggggacggcgtcggtgcagcaaggcttgtcgaagccggagcggggccatcttcggacatggtcgagtcgggtgatgccacatcttggaaaggcggcggagtggcttccttgctcttgatcggttcgttcgggaagagcggggctgcgaaatgggcacgagtcctcgagggatgatcaaggctgttcttggttgagatactgctttcgcttgactcaccacaatcggaacacaagttgggtcgcccgactggtccgtcaaatcgtcgtttgtcgtccagaaccgtctcggggcgatgacaattcgagcaagtccaagcgctggtaggccgttctcttgttctgtcggccgaacccgtcgttagtgcgagaccagagtggccgggctgaccaagcgtggacgtctcctccttcacgggctgcaaggccacaggcttcgctggttctggcgaggacgaattgatcctgttccgtcgactcgccctgacggcgtggatgatattttgctccgggctaggcgcggctgagtgatcttcttgctgcagctcgctcgtcatggtcgtgatgctcgctttggcagcgatggcagcggcccgacgaggcgcagtcttggctcgcgagggcgtcgtcttcgctggcaacgacaatttgggaatgaccgagagaacgatcggcacgccggcctcgtccatgccgccgctgattctgcttcgattcgttttgacgggttcacgatcaggcaaagctacgagacgtcttgcacgggtgcctcgcttcttcttgcgatccttgtccctgtcgcgatctcgctcaaacgcgtgttgatccatctcggtaaccgctgttaggaatggtgtatacgtcgaaatcgagttgccgtcatggcgaacgacttcgctcagcggaggtaaaaagtcggcagctagatcctggtcggcgatgcgactgccgtcgaatgcgtagccgatcagggtcaacgacttgaggtagacctggatctgttcccggatgtcgtgcgcaatcgccgttctaataaagcggtttggccttgatcagcgaagcctactatataatagaagcgctcattatcactcacttgaactctccgttgagacccaattccagtgagtatacctcggcaaactgctctggtgttgtctctgactgtatgtcccactcgaagcaatccaccagatgcatttcgccagagatgatatcgagctgcaacccatatattcagcaacgactcgatcgacaactctactttgtgggcgacttacctgtatccggatgcgcagatcataaggcaatccatctacgtcctgcagtatcaagtcgtcaactggcatcggcttgtcctcatcgtcggctccctggtcaagagagagtgcttctttccgcatccgcttccaccactcgacgtcctcgtctgtgaactcgttctgagcatcctccaatgtcgattgcggtacgatcgcttgctcagattctcgaacacgttcctttatcgcctcggctatccgcgaacgcgaaggttccatcggcaggtcaaagtcttcacaaatagtctgggcgaacatttctggcgtgatgacaggatctgcatttacaggtcatttggtgttgccctcaatcagcgtgtttcctggcaagtatcatgaccgcgactcacccgatgcgttccagatgaaagtatcctggaacctgttctgttccagctcaaggtctatccgcaccggaatcaaacgatcctgtactgtcgccggtttccgtagttgcgccttcgtgctgcaaaaagccagcattcaggttcgaattcggttaggtgtagtgctcgagatctgcgcttgcttgccgagacagactcacaatcgcaaagccatgtgcttcccattcgtccgcttcttatccctctggttcttcttgtcaacaggccaaatcaaatccagtcctaacggacgtgtcgccttgggtaatcgcttgtcgtgctcccaccaggcgggtttctgggtcgctcgccagtcctgcatacgctcgcccatctgctttcgctgcacttcccatgtcgacgcgtactcgatgtcccgatccatccacgccctcatctgtgactttgtcctgtccgcgagcggcaatatcgcgccgccaagtgtcgggtccttcatctcgtcgaggtcgtccggtatccgttgaagatgcataatgggcaaggtcggatgacggtacttttgccacgactctatgggaactggctcgtacaccggtgatggcggtctcgctggcaatggcgggacaggcgggggtgaaggcgcaacattgacgggatttacaggcacagttgttacgctcggaccagcagaagcgtttttcgattgttctgcggcgacaggggaagctgcgattgcttctcgctgtttaaggtcagcggcggcgttcttcttcggtttggccttgtgcgatcgcttcttttcatcctttttgggcgcatttgcaggcgatttggtggatttagaatcggcctggttcttgcggctgctcgcaccgctaggaccggtaagagcaggtgtcgcggacggcggttgcatgtgctgcgggagcgcttgttgctgttgctgctgaggcgtgggctgttgctgctgctgctgctgttgctgctgttgctgctgctgttgcgcctgctgctgctgttgggctcttgccagtattgcgacctgttgcacatatctctgcatgctcgccatcgtctcctgttcgactgcgcccgatctcagcatttcattggccttgacgagactggcaaagaatgccggttgattctgacgcatgatttcgactgtgctcggattcgacaaggcctggatgtagggcaaaagtcgaggatcaaacgggaaattcgtcggcatggggatcgattgagggaggaccatcccgctgggtagctgctgctgctgctgaacgttgccgttcatcccctgtggtggctgcatcggaagactacccgcctgtcccatgccttgctggcctgcgggcatcatgccgccgagattcattccctggacttgtgatgccccaccatccgtattctgcctcttgttcctcacgctgttccccggtgatccttgaccacctccggcggcggtcgccccacctccggtcgagctcctttccttccgttttcccagcaatgccgacgcgttgatgttcgtcggcatccccatctggccctggaatccaatctgggagttcggcgtggatggtggcatctgctgctgttgctgctggacctgagcagaaccttgggcctgagaatgatgcgacgcggccgaggacggtcgtggcacgtgctgctgatacatgttaggtgggaactgtgcattcatcctgggcgacggcgacgagttgggtcctcccgcagcgactccagggaaattgggttgaggtttttgaccctgttgcatggattgactttgagcccggaacggctggctcatcccgcccggctgctgattattcatctgcatcgagccgccttgctgctgttgttgttgctgttgttgctgctgctgctgctgctgctgctgttgatggtgatgctgctgcatctgctgctgaaagtgctgttgctgctgctgcatctgtccgagattcatattcatccccgcggccccagccatccccatcccgccgacctgaccgttgttcatcccacccgctacaccggcgatcgggttctgagcaagcgcctgcatggcccggagcatggtcggatggttcatcatcccctgtgcgatctgaggttgaagcggaggtggtgctccagtcccttgttggcgacccatagccggggaagaaaacgcttgtcccggacctccctgttgctgaccgactccgccgaggttctgcatcacctgccctggctggccttgagattgcggttgaccgtgagcctgagcctgagcttggacttgagcttgagcctgaacctgtcgatacgctgccaaagcggccaactgggactgagcgtacagcggcaagctctggttgttctgctgaggatgctgttgtccgacattcccgccctgtccagagacttgactgaacatctgcgggctgaaacccatggggaggccgttcccacccaagccgaggttcggggagccgctgttgttcacctggttgttgttcccagcattgttgacgttgtttccgttgttgttcagggacccgaattggctcgtcgggaatccattcatctgcgccagagcttgaaagttctgttcggacccccggcatcatcagagacgcagaagagatcagctttccccgacgccgccgaatgctaatgcagctaggctataatatgcttacgggctggtgttgctgtttggatccctgactttggccatactgcccataatcttgattcatcctcgtctagaaacgcgacctcgagccgggacaggctaggaggaggtcggccgaatgaatacgtccaccggtgccgcctcgcgtttcccttcgctggctacgtccaggaatcgagggtatgtggggcgagctgtatcggtagcagtatatctgctagggacccacggcttgcgaagcgagagaggtaaggagacgcgagaggctaggcgtaaaagaggtagtcgctcatccgcgctctcgtccttacttgcgactggtcctgttcgttgtcgctacagtagtaccccagctgagattggtcacgagcccgagcttgtcttcccaaatctggcccccagtggtagttccagcggtcgatcgtcgagccggagtcgttactcggacgtcaagatttgaatgtcaacgagaagctcgcgcgggggtgaccgtgatgagctttctctgatcccgaacggcgtgtatcgagtcgtttctttggcctgctttagggatggctgtcctacagcacgttgccctgttacaagatatctatctcggtcgtatttgacgagctcttgtggtgattgtgatggtcttcttaaggttgcatgacgagtcgagttctcttggatgcgagtttgacctgtttgggacgacgcgatggcagaggtgtaggcaggcatcgcatcgcatcgttggggagtgaggctgacatgttttaaaataatctcgtcatcctcctaatcctttcagcgaccactaccactggctacagctttggctcgaaatggactcttgagcgagtcaagacacatgatcgattatggaccattttatttattgatgattcgtacgaccaagtcgtataaaataaagtctcatgctcaggtacgtaccccgaacctcgttattccccctcgctctcactctcggtcttttgccccgaccggacccctttcgtttccggtcgatcgatcgagaaatgctcttccccggtcggtcattcggatccgagagatccacacacgcacaccaacctcggtctcggtctgtttctctaatcaccttcgtcgtaatcgtcaccgttccccccttatcaagcagagtttgcccgcttgcaaacacgcacgtccgcatgttgacaaaaggtgtggatcacatgtgtcccgcccttcatctgactaaattccatccattctttggccttggcatcgaacctctctatcgtggtctttcggtagtgtatccttgtagggaggggggagagagatcaggggtggtcatcaaataacgttcacacgtactccgcactcccccctcctccagccaaagatatacatccatccatccatttcctttcctgctgcgcgctggggggcgcccccttagctagcggcctcgttccatccgagccgacgtaccccgttccatccgccggcgcgttctcgtctctatcgacccatggttcatggcccatcgccgaacccgtccacctgatcagtcccccggagatccggtgaatacccacctatgcagaaccccattgataagttatcagtcatggtggaaacatgtgaacgagtccgcatagacgagctggtcggccgagagaaagaaaaggggcggctgggtgagcggcgaccgatggaccgagtgatgtggagaggatgacgaatgacaaacagggactcgagaaaagggaccggagaaattattttagcaacgcagccaaggtcgctcaaccccacaatcccccctctcctcttgcccggccacaccgggtgttttgtcctcccggccgtacaactcccgacgatgcgagatcttggttctttaccagttaatttcaggtcgtcgaaacggccgagattcggtctttatcatcgcttgccgagcatgtcattgtgcgaggcctgcgtgttcggctctcggcggcggcggcggcggcggctaatgggcaatcacaatcacattcacatcaccagcagaacctaggcgagcggcatgtcatcgtgcacgaagccgatcgaccgtaggctgcaacgtaagatgacggtagtgtaccatcaagacggcggtgaaccttctcgagatccggtccatcccggcacgatcgagaccttgcgacccagctgcattcggcacgcaagcactctagttactgcacggttcggaacgaccaatcgacaggaaggcaactcggatcaacgacgctgctcgcaattacgttttactgacattctggttgtggtcgagatgaacgtcaatcgtcatcatcatattgttggataacggtgctccggcggatatgctcctgcatttgagttcccctcgcgagcgccgagctcctcggtatgggcacctgctcgtaaacgtgaacccgaggctattaacccctacccgactttgacatgctcagccgcccttacgaatcgcctcaaatgcaataataattccctcgtcgccgctctccatttcaattccttggcagaagaacgagtacaagctcgtccggtcatgcacggccatgttttacgagtggaacgagcatacaacgacattgaggtttggaccgggctgttgacctgggatagccgaatcatcgccatgcatatggacaacgtcaccgagatgagagaaaatagcttcccacgaacgtccttcacgaggtgaggcgtctggacgatgggtgatggtaagcatgacgagctcgaaatcttttgggagattgtattcagaacgtcagatctgaagcaagcgggtcggactggcggctgattctctgataccgagatcaagctgcaaacgcaacttgaccagcgcagagttcttttgcgacgagggacgcatctcggaatgtggataggtatgtcccattcggacgaggccgatggtgtgtattgaggtgtagatacgtgtgaccactacctgggaatatgatacatgctacacgacaacgctcgagatcttgcagaggcgagctgaacagaccgggcctacctctatgtcatacgcccttgatagtccatgagcacaacatgatcgattcgcagcggatagagcggtccggtctgtttggcagatggcgccgtcgaggtggtcgtcatgatgatagaggcgcagacgtcgtcgtagactcgggcgtaatctccttttgcccgaagttcggtggaaagttggctggcggtgcgctatgatccccgaggaaaacacctcgatcagccttcacattccacgctgctacaggtgcaacatcgagatagtctttgacgggtatgagaaactcaccttctcacagcccatacgtcctcgctactcccaccgacccttcgcgaagcccaccagccggcctttcgcttgatccacagtttacgacgttcctcttcgtccacggatttcagagacatgcagtacttgaagtcttcaaacttgtccgtgcatactttcggagccccgtgtcggtagacgttgcgtaattgaggaccgagggctagaagcagacgagatacatacaaagtgagcaggcaggacaagaaatatatagggtggaaccggggatggaggacgtaccgtagcagctcaggaattcgtcactacgaggcaaacaatcccgtggtctgtcagtagtgcatgcggatgggaagaagggccggaacacaaacaactcacaataatgtcatgcatcccggaacttcgtcaaacgtaggatactgagccgcttggagatgcagttcgtcttgaaatatcgcatcgtaccgtctcaacgtcggggtcgacgatggggtcgagtccgaggagctcgagtttggggttgttgacgaggatgccgtagagttggacattgtctttttgacctcaagggtacaattagatttctgaatgtagtgggaccagtttgatgggttggcctactcatacgtctttctacaaagatgcacgacctagacctagatcacactaactttctatagatctgagacgacttgggtcgctcggtgattccctgttaaaatacgcgtcgcccccttcacctcccctgatcgatcaaaagacctctagtggtaagtacagttagtagagcctccactcgctcatttcgtcgtgaacctcgatcgtcacactaacatacagctgcaaaggtcttcctacctgatagtcgatttgaatattcggggacggctcctgcgatccagaccgtactcgtcatggactcgtcttcttccgactggatctggtacccagatcgaggattatactactcatcacagtcacaagcttacgctcggccaaacccgtacgcaccaaccgggtgggagtatatccccttgtcgaccggcggtcagccgacacctcagcaacagcagcaggtgacatccacagacgaaggtggaagagtgacggtagactactcgaatttgcaacaaagtccgatcaaggagacgagcgatgaacaggaacgcgagggcgaagagggtgggataggcaacgttgggtggggtctggatttcgtcttgcccggggaagaacctcaagctcagtcggccaagacaaccgaaaaagatgcgtcgctcaaaccagaagcttcgacgtctgccctccttgacctgaaaccgtcgccgaatgacgcttcggagcgtgcgaacatcgtcaaacccaccccctcgatcgtcaaacacgcgacgacactccgactcgtcaaactcgcctccctttccacctcttctccactctccacgagcgagtccctcgccgtcctcgatgctcgaccctcgggatatatcctcggaagggataaacacctggccaggcccgtcttgcgcctaaaagagctcgccgtgagcaagatccacgcgacggtgtggtttggctggagaggcaaagatatgggcgagttgttgaggagcgatatcaaggacgagctcgagctgttggacgagaaagaaggccggtcgggaggtctcggcgagtcggcaggggaacggaggttctggatcgcggattgtgggtcgacacatgggacctttctgcgatcaggctcggcttcggaagaggtaccccattcggcgcccaaggagctggaggaaggagatagactctctcctgctcggaagccatccgccccggtccccctgtcacatctggacaaggtcaccatcggatcgacgacattcgaatgtcacctccaccccgaatggccctgcgagaaatgcgccatgaccgatcccagcttgatcatccccctagctgaacccgaggatggcaagacgagcacgacgtatgcttctgcgggtacaactggagcctcgatcggttcgggaatgggcgggatccctacggtcccagggaactggaaagagaccgaggagaggcggatcgcgctcaccgcagaggcgaaacgagcggatacccataggaggagcgccttggccatgaagaagctccgggaaagttatttcggcggaggtgcgagtgccggaggaggtgcaggtgacgcggacacgggtggagatggcgaaaaggcgacgggcgggaaacgaaagtggggtaacaaggcggataaaccgagggagagcgatgagggttggaagaagaaacggatggctgatacgtcttagatcttagagttggacgatgacgaggcgaaattgacgaacccagggtttgacggcatctttaatgaccttgacgatagctattacatgacacaacattcaactccgctcgctccgatgcctcttttcagacgattcgatccgtggtagaagcctgtacgcgtctggatctacttctctcaatctcagctagcgctcgatgagcgagcgcctgccatatccgcctcacgcatgttttcccccttacttggtctttttgatcttcttgaccgcctcgaccgcataattccccgcgcctccattctgcttctcccattctgtgagcatgatcatgatcctgctgttgatccgcgaccctccgttctccttgacgtcttcgaggccgggaaggctgtataaggcgctcctgttggagaggacgagttcgatcatgccatggagcaggatcgtctgtccaagggataagatggtgaggacgtgagtttcaagtgaatacgggacacaaagaggtatcgataccgaccttgcgttgttcgtcgaaaggttggccggcgttgcttgccttcttgcccctagactttttaggactcggggtcgagtccaactcgtcgtcactagctgaacgctgtatgagcaacgacggtccttgaattagtcgagaagtcattgatgaacttgttgtctgcagattcgtaccttgaccgacatctttaagacggtgtgacacaacagaaatggatgaggtgtctgaaagatgagcaagtttctgaggtaagtgcttctcgaattggtctgtcactgatgtcgagttcttatcagaagtaggatggcggcatttggacactcgccaaaggtaagaacggaagaagcctgtacgagatcgtcgctcaaactgagttccattctctacaatttcgaacaaagcacgcccgacacgaagtctcttttgttcacgacgaatgatacccccgcatctcccatcctgctgctctacccggctcccactcttcatttccccgttctcgccgccttatactgcttagcgaccgtcccatccccgccgttcgccttgtccaacgaatccatcaatagctgaaccttcatgcccagcttggaactcccgtgcgctctgaaggcttcgagaccgggttcggtatagaggctcgtgcgttgttgcatgacgagcttttggaccgctcgggcgaggatgagttggtgttccggaagccagtctgcgtgggtttcctgcgctcgagaacgtttgcggggcgagggctccatatcatccgattcgctcttggtacgctgtatgaggagcaaagtctcagcctgatcgcaataccagccggccggtagtgggtgggggaccgaccttgggcatgttggcaactgtggcttaaagagtcagaggaagagtgtgcttgacggagcaaccagcttgaaggcccacaagactgactcgcagtatgacagctgtgaatgttaatatatacatgtcatccatgacctcggctcattggcgaagggttcttcttccgggtcgcattgaagatcgtcggcgctgacccttagcgctgaacaaagtgaaaccacttcctttgggtaagaacaaaggccaaggtagttccggccaataacaaggcgaggatacttgtatggggtcagatcgggcaacacggcaggtgccacaacgaggacaaagaagagattctgaggcaggaagtcgggtacttgttgggctggttctcggtgggcttacccggagttgaaaatcgcaagaagggtcgcagcaaaaaagttcacgtagagtacagccagcacgatgtgcggccagtacaccgatcacgactataccactcacacagggacactgtgatttgcttctccttggtgttgtgacccaggcctgaatacggaatacttgagaagaggaatccgtgcatgtcatcgatgccgcaagtgaaagcctctcgggtgaaaggtccgggtgaaaggtccgggtgaaaggtcggcaagtatactggcctgcttcctctgcttaggtaatcaaaattcaaactcgatgatgccgtcatctcggagatcggtcatttcaatgagcacagcaaccagcatatcagcatatcggcatgcatgtcgatttgcaacgtgaattacttgcttgatgacaaccgctcagttacgctggactgacggatctaggatatagctatccacggtgatccccaaacgaaacccagacctttgtcttgcatctcaaagggattcctcgtctacccctttcaatacgaaaagtcgcagaaccacactccaaaatgagtagcagttcctcagccgtccagccaggggctacaaagcctcgttcacggcttaacaagcttggggcatcacccgagtataacaaggctatggaagatatcatcaaaaagtcgtcagagaagaagaaaaaggtcggtccggtcgtgacgtaccacctgcgttccgcgttccaactcgatcagacgctcaactgttctctcgcttccagctcgccaaaagcaacacctcccccatgttctcgtaccgacgactagcactgtctctgatcctcttcggaggcctttacggaatctggaagtacgacggtctgttcggcggcttgcccaaatcgtcgaccacttcgaaaccatcgacgccttcctcatcccaatcgacctcgcaacccccttcatcgcgtcccactcaggtcgacgtcaaggatgtgccgttcaaatggccttcatgggctccagcgagggatcaggtcgggaagctcctcccggctattgacgattcgagcgagttggtcatcgagaccgatcaggataagagggacgcggtcaaggaagcgttcgccgtaagtgcagctcgaccagacagctgctttcaatccagctgatatgttttgactgacaaaacagcattcttggaaagcatacggtgcgtatctttgatggccacgaccttgcatacatgacgctcaatgacgcgctttgttcttcggaccacacagaggaaaatgcctggggggcggatgaagtgagcatcacgagcattccgctgtattggcggattcctctgacttggttcgttttgtggaaagtatcaccccatctcgaagagcgggtcgtacttaactagcaacgagcgcgggatgggttacacgattgtggactcgttggactcgttgctcctgatgggcttcgacgaagagtacgagcgggcccgagattgggtcagggaagagctcagtttcaacgttcctggaaaagtcaacggattcgaggtatgtcttgtctcctctgcttgcggcacgattttcgatgactaaagtgattggatggcctctgcatcagaccattatccgaatcttgggtggcctcttgtcggcataccacttgacttccactcacgccaatccggtataccacacggattccaggcttttcttggacaaggcgctcgacttggccgacaggctcttgcctctcttcgacagcccttccgggatcccctattcgttcatcgatctagccacccgtaaagctttccccgatgtggacaatggtggcatgagtagtctggccgaagcagggacgctccaactcgaattcaagtacctcagcgagatcagcgggaatcccatgtacggacaaaaggccgaacatgtgatgcggctgctcgacaaggagatgccgggagaaggagtcgcaccgatcctcataaagtaagtcgacaaaggcatagtccgctcgacaaggtggctgaattgttcattccttatgtacagtccggagactgggaaattcgcaatctttgacatcaggctcgggtctcggggtgacagttattacgaatacctcctcaagcagtggattcagacggtgtgtagtttatacgtgatgggtcgagggcggattgacaatctgacggattaagattacagaatcggacggaacccgtatatcgcaaggtgagagttgacatttcggagaagtcacatcgattctttgctcaaacagactcgtcttgtgactgtagatgtacgaccggtccatgaaagggatcgagcaggtcttgatgagcaaatcggccaagcagaatctcatcttcacccacgagctgggacctcagcgtggaagtaacggtgtgccgtgagttgtcatcctcgtcgcagctggacgcggccccaactgaccttgcgttttcagtcaatggatgatccggccaaagcaagatcatctcgtctgtttcctcgggggatcgatgatcctcggagtcgcttccgcctaccctggaaaccatcccgtctggtcccagatgaccccgtcccagcagatcgactatgtcgcgggcaagggcctgatcgagacttgcgtcgagacgtacgagggcaatccgactgggctgggagccgagattgtcatgttcaggtcgcccacggagaccaaggcacacagaggcaacatggattggtatatcaagcggggactgtaggtctatcttaccctggatgatgtccgggacgaccttgctgatgtcggtgggattccggggctccagggaggacgaacccatcctggacggccgtaacatccttcgacccgagacgatcgaatctctcttcctggcttaccgtctgacgggcgaacaaaagtaccgcgaccaaggatggaggatgttcaaggctttcgaaaagtactgtcgattgcctggtggtgggtatgccgggattgcggatgtcgaaaacgggatgcacgtcgaaaggctggacaagatggagacattctggttgtccgagacgttgagtgagtcgacaacgcgttgttgcgcgtgtgcgcctgtgtgttgacggcacttggcgacccgatagaatacttctatctgctcttctcggatgacaagactgtgcctctcgatcagaatgtattcaacaccgaggtgagtcttgaatgggttcgactggcgacaaagacgcgtctgctgacggcttgggtacgccataggcgcatatcctgccggtattcacgccgaagagcgtctcggaatttgctagcactatctgattgcattgcatgaatggtcgaaggccagaaaactgtatcatacgaaaggtcatgcagttgcccatatctgaggacatattgtcggctcaagagtgtcccgcggatgtaaactctggggcttgtgatcgcgtttcagctttgacccgtgatgaagtgtaattaaagcaagtcaacgcgcgacgaggagcgaggagggggctggcgagtctttttgttcagggaagcactcgtccaccctcttcaaagtgggaaaaggggaaacgaggcagtctttcacattcatcaaaactgacgttcgtattgctcacattgccatatttccacagagcgccgactggcagacgtgcatttcacaaggataagccttcctgacgacgctgttttgctcgagcccggtcggtcggtcatacccgctgttgcctagaaagacgtttggtcgaactagtcgggaggtgaacaaaaacgcgtacaaaacgatagcttctttcgccatcatccactcccgtcaggatgtcgccgccttacggctcgttctcccctttttgctcgtcaccgtcgtctgcctcggatcagggggatgtcacgatctcgacagcgggtccactcccacactgcaacctcttcttccgaagcctgttgtcgattacatctccacccgcccttaccaccctgttcccattcagggacgtgacgggtctaggaaatgggagacctttgggccccattacgcctgagacgagcgtggaagacctcgtggctacccgagcgatcaatcgagcgggtacaggggttggaatcaggtgtgacgttggacggatcggacaagaagggagtctaggcgatatcggtgggtcctttggcttcaaagacagccgatatcatgcgttcgctaactttgtgcggtctctgtagcccacctcatcacgtcggccgtgagttttctggtcgtcttgagcatcattttcaggactatacgcagaagagctgctgtcggtcgaatcgagattctttacttccttatcgtaggcttttgcatttcgtctgattatacagacccgggggctgataagctcgggctcgttccacttgcagctctttgctctcacactccctctccgtatgctgacgacagccaacgtgttgcaacaaggctctgcggggttggcggtcctgtcagcgattcacgtcgcgatgaacgtagggatgatgtggatcttgctagggaacgccatcgtcgccacgcaagtcgtcccgtgagtctcgtgtcagcttttatcatcctcctatcgtccaaagtctgacgagccgattgcttgccctgttccacagcgacgggactccgacgtctatcatccccatgagcctcatcctacttcttttgttcggattcaccgtgtacatcgccctggatcaagctttcggtatatcgatgtggttcaagctgacgagcgggagggcggaagtagggcagctgcgcaatgtcgctctgtggacgttgagcatcctttggccttatctgtaggtgcaccccgatcgtgttgaaggacgacctttactgatcatgatccaccaatggcgagtcagagcgagcgttttatacctcgcaatcatgctctacgtggtgtactaccggttgcaagagacgagaccttgcctctggttcctcctcgccttcctgcttttcgctggaagtcaggtcgttctctttctggccagccagccgctatgtgaagtgagaggctgggcgtcatcagccaacgtcgttcacgacttcgtgctgacgcacttgaatctgctggcaggcctcgaatggcaaattgacctcgggattcctgtcgaccctgctcgaaacggcggcagtggcgatgcttttcgctgcgtggagcgttagttctcttcaagggatccagaatcacgggggactagaagctaatgtttcgttgatgggctcgaacgttgcagagtatcaccgaagccgagtgggacgaaccgatttacatggaagagtatcacgggtataaatattaggattgttccagcttgccacagcgactgttctgagtgggaccacgagaatgtaattactatagccataatcgggagaaggcgcaatatcatgatatacctgatagtcggcttgtagagacccctgcgctaccgccagaatccataacgactgccacgatatattcgctgacgaaggtcagacctagtgagacccagattgcgaccaggacaggctgctcacacggtggtctagggaattcattgatcagtccgacgttgcttttggtctatcagtgtgagtatgaagaaaactctttgacgcaatcgacatgccagccacgttattctctgcaattgtatcaggtcttgcaccaggctagaacctggactaaggcgccagcgagagctgacacaacacatcttctgtctgcgtcacgcaaaaccgtacacggctctccgccatcactagtgaggttcgttgagatcgagcagttccagctctgtacgtacacgtaacaaaaattggacgtaccaaatcatgcattgggatcgcaaaaaatgagttaccagcccaatccagcaggtcttcaggccaactaggacacagaaccagctgcttagtaggcaggcttacctggaacggtcaactagatttgcaaccttttgaatttgtcttgtgacatacgatctatggtccgttttgcagacaacaagttgtgtagtcaccctcgcgcgttccacccttagcgggaagaccgccttgacgctgaggtattgcactacctgtaccatggcttgtgaagatatgatcagctctcgtccatcacattatcaagcctctcacgagctgtcaatcggattcgcacaaatagaggcttagttagtactgggattcttaggacccgacaacacctcacaaccatgtcgaaacgtcccagcgagaacgggcaatttggcaacgatccgaagaggatgcgcaggtgagccagattatcaggtcggccccttaatcaagctgatcgatccactgacatcgcaacttcgcggacagcggtgtgagtgtctgttgagtatatcaatgcataaggctaggcacagatcgctgacttctgctgctccccttcacccgcgatatataggaatcgctcggcgggctgcccacggctcctgctccgcctgccgcaggacgtcctccaggtggtctcgacatggatgtcagtatactaagatcagagagggatcgaattcatcatactgattgtacgaagtcgttcctatacaggctatccgagctcaaatcaaagcccgtatggccgcacttggccagacgaatgctcaaggatccgcatctcctcaacccgttgcagctagaccacccgttgcctctccttcgggtatggcgggtggttctgcgtcttctgatattcaggccaggattcaagccttgaaagctcaagtagctgccaagaatgccaacctcaacccgtacttaggaggatcagcttcgctacctccccggcctgctacaccttccggagaagaggtcaacccgaacatcgcaaagaaaggagggttgtcttctgtccaggctcatcctttgctagcagacatgaactcttccaacgcacctggtgaaggtaccgcttcgacaggtggagcgtaccagaagggcaagggcaagttcagcagggtcatggctcccaaattcacctcggtcgcggccaacgccaggctagccgctgccgctccctcgtcgtcgagaggcggatcatcgcctgctcccactcgatcttcccttatcgccccctcatccaacccttacttggcgtccacctccgtcgatcccaatctcgagccagatgttcaggccgctcagagcgagatggatgccctagcgacccgaagacgaaaggccaccttgcacttcaacgccaaaggcaaatacatacaacaggctgaagagcagcgaaaagaggccaagatggaagagctccgtcagcgaatcgcggaacagagtcgaaaagccgggttggactctgaattcgacgtgctagagcgaaacatcaaacgacagcctcctccagagatcgagtggtgggacgcgcccttgttgaagaatgcgagctacaacgacttggatctgggtgaagagggcaagcttgttagaagcgacgacagcttggtgacaatctacgtgcagcacccggttccccttccggcaccgttcgagggcaaggcacaggagcctaggggcctcatgttgaccaagaaggtcagtcaatgtctagtaccgtcaagcacctgtatggttccgcgttgactgatattcgtgattggatgtatacaggagcaaaagaagatgcgaagacagcgacgggcagccgaattgaaggacaagcaggatcgtcagcgactcggtctgcttcctatggatcccccgaagggtaagcaaggatgaatgatcgaacattgacgaatcgacccctgactagccttttctttccgcaatctggtcacgtagtcaaggtcgccaacatgatgaaggtgttgaccgcatctgctgtccaggatccgacaaaggtcgaagcgagagtcaaggccgaggctgcggccagggttcgaaagcacgaacagaccaacgcagagagagcacttacggacgagcagaaacgggaaaggctggagcagaagaaggttaaggaggaaggcaagggagtttatggttgcgctttcaagtacgtcggcctccgcatctgggatcagattcgtctcgtatcagctcacgcctgtaattgcattacagaatcaagtacctcgtcaacggagcacacaaattcaagatccgagcgacggcggaacagctcgctctccatggaatgctcgttttccacccagactttgccctcgtctacgtcgagggttcggccgcttcgttgaagaaatacaagcgtttgctccttgtgcgaattgactggactgaagaagcccgtccgaaaatattcgatggtccggagggtatggacctcgacaacaacgacgaggacggcgagggaaatggacgatcgggatggcagcccatgcaggagaccccggaatcgctcgccgataacaagtgcgagatcgtctgggaaggagaactgccgcagaagaatttcagggtatttaggtaccggaatgtcgaaactgacaaggagggtaaagaagccctcggcaagggtcgggagggtgtctgggatctggccaaaaaatggatttgggaaggtgtcgattgattgacgcactagaattacatttctcaaaggcaaaacccctcgatgtaattaattacacgtcacgctcaattgcaatttgataaagcgagatcttgaccctcacggttgctcgctcgcagagcagttgcatctcgatctctactacttcatcgactttacatcgaccacattgccttgctagactaccctcaacccattaagatccatccaccagtgtgtggaactgtaatacgatactcaaaagccggtcaagctatatagtcagtcttgccgagcacataacgacacgacacgacacgcttgcaagcaagaccatctcgcgaattcacgccgcgaaattgccctagttcaatgcagtagggagagcgagacagaacaggtcgtacccgaacttcatcgacccgtcggggactcgatcgagactgtagaggaggactctcaatatggcaggtccggtaccgactcctgcaggtcagccgcctactgcggcatcgtctccagccggctcgtccgcgggatccaagccgacaccgaccagcacgaatggccgtacacccgcgacgtcgacgcctgcagcaagtacagcccagacttctggcaacgctccagctactgtggctacggagaagccaccttcggtaccggcgagtggaaatgctgaggcggctccgcccgctcggaaaccagtctcggtgccgccctcagtcagaggtgtctcggctgctgccggttcgcctgctacccccacgacagcgactgctttgcccagcacgggaaacgatgaggtcgcggatcgaagaccttttagagaaccgggcaagaacaatggcggacctgtcaccaaggaggagtgcgagttctggctcagcaagctgcaggatgagaagctggatcttagcaagcgggcgatgatcggtaagtttcccagcctctcccccctcggtcacaatgctaaagttacgtatattagcctctgagctgagagacaatgccgatgctacccgggagcctgcggtgtacgccatcttcctcaacaccctgatcccgcccatcactgcaatgctgctcgagaccggaccgcccgttgtcttcttcagggagccgccagagcaggtgcatacactttgtggcgatacgttccggggaaatatgctgatgaaccaactgtgcactcgatagcgcttccgaaacacgctgctagcgttcctgcagaggctgcctcgaaccgagcctttgaaaccccacgagtcatccttgatgtcgactgctctcagcctcctcaaggtcgagaacgaggacaatgcattgctgtgcatcaagattatcatcgatgggttccgcagtcacaaggtcagtaccgaacacgtctcgtgaatatgtgggatttaagctcattcggctcgagccttcaggaacaaaccgagcaacatgtccagccgttcttgaatcttgtcaaagagatgtatgctaacatcaaggaggtcgtggagaaagaatttggcaaggctgggaccaacgaggtgagactcgctctgtcgatgtgacccaaacaacggagcgtgtatttacaacaatcatacgccagaccgatgctatgcaaggaatcgagtctgctgctccgatccaacctcagagccaaccacaaagtcaacctcaaactccggtcgcgcctacgccatccgcagtgccaacgcctgcccctgcaaacaagaaccctctctcagcaaccttgtcttcccctaccgcacccaaattgacaccgctgccgcacgcccttcggtcgccaaaagtcttgacggaatgtccgattgcggtggtgctgatattccaaagcttccgatcggtcatgcaaggcgcgatgaaggatttctatcccctcgtcatggacagcatcgccttgcagccagagccgcagagaaaggcttatcaggcggccgaagagaaggggcagatctttaccggggtcgcagaggggatccacaaccgcgagatgtacaccgagatcatcaaggctcaggtcaaggtatgtgctatgacctcgtcgctcgacccacatggcgattgatgatgccgccctttcagaccatggctttcctcgcatatgtcttgcggggcagcatcgacaacatccgaaactatctggacatctttccagaagcttgcgttcggctcttgcgcgattgcccaccggaggacgtagcaaccagaaaggtttgtttgagatcactgcagcagtcgaaagtgaattcggactgatattttcaaccatgtcatggcaggaactactgattgccacacgacacatgctgtcatcggatttccgaaccgcttttgtgcctttcatcgacatgctgcttgatgagaaggtcttggtcggttccggcgtgacgagccgcgaggcgttgaggtaattctgtcgatacctgtgtcgatacctgtatagtaagagtaggcaacgctaacgttcacattgacttctgtgaaacaggcccctggcatacagtacattggcggacttgatccaccacgtgcgcaatgatctgtctctccagcaactcgtacgagtcatcgcggtctacggctgcatcagtcacgacagcaccttcccattcagcatacagaccatgtgcagcaagttaacgcaggcttgcatcgaatcgatttgcaacaagggcgacaaggccgaagccgtctcgatcctgcaaggcgtattgctgacaacggtcgaaaagctcaaagcgacgtggaaagcctttgatcgcatgaaacaggcttcacagcaagacaaaggcaagacaaagaccatggaggaagagcagatcggtcgacagggcttcgatgcttacgattggcgcagtatcgagagagccatgccggttttgacggtggcgtacgcctccgatagtctggaaaccttcgtcagaggtcagttatgctgtcacaatagccagttgtgacgaaggacgctgatatcaggacgcttccacagatgccaagacgattcttcggtcgctcttcaatacctttcgctcactgttcaacaacatgcgcgtcatcgacgcgccttcgccgcaaggcgacatcctgggcgatctgtttcgctatggtgtcttgtcgctacagatctacgaaggcggcagagatactcgagaggagaaagatgccattgaacaactcggcatggttctgatctgtttcgagccccacgtctactctgaagtctggacgagcaatctcagcttttactgtcagcagctcttggaaggccccaacatcatcagtctgctgcaaaacatgctcgtgaacaatgaggtttctcatcagacggtcgggatcttgttgaagcatctcatgaccaacctggaatcagtcggcacgcaaagcaagatagagggtgctttaaccctcaagcttttcaagctctcgttcatggcggtcaaccaattcatcgaactgaacgaaccggtgctggtaccttacctctccaagttgatcatcgactcgttcgcatatgcagccaaagccgaggatccctccatttactaccaggtattgcgggcattgttccggtgagtgatttgcatgcatcgcgcacctgaagatcactgatttgaacaatatctgacttatcctagctccattggaggaggtcgctttgaggctctatataaggaggttctgccgattcttgaggagatgttggagacgctcaactacctcttgcgccacgcagagccatcgaagcgcgatctcttcgtggagctctgtcttacggtaccagtgcgattgacgaatttgctgcctcacctcggttacctcatgcatcctttggtgcacgctctgaattcgggcccggatcttatcagtcaaggtctgcggacgctggaactctgcattgacaacttgacttccgagttcctggatcccacgttggatccggtgcttcgcgagttaatgaccgcactctacaatcttctcaagccggttcctttcaaccatcaacaggcgcattcggctgtcaagatcctcggaaagctaggaggccggaatcgaaagttcgcacagacaccgtatctactcgagtttcatcctgtctcggaggatattgtgattcagttcgacatcgaaggcgaacagcaagaattccagatcgcatcctgggtcgaactcgcggtcaagcacgtccgcaatccctcggcatacaacagggaaaatgctgtgacttttctgaagcagtgctctttgctgtttgtctcgaatcgctatcattcgatcgagcaggaacctgtactgcgaagcgtgatcaagggcctctttgatgccagcattgtggatgaacagcacgaagacatcgttgagcatatcagactgctcgcacatgaagtcttccgcctggaattgcaggaaacggctcgcaaacccctcaaggctggcaagagactttctctccgcccgtcgtctttcatccagagtatcatcctggccatggcggacggcatggtcaacagtgctgatcgcatgaaagaactgttcgaagtcatcgtcaaggatctgttgatccagaagaaggaggccgatgaatcgtcggattcgtcgtcaaaggacgccggtagcatcatgatccagatgttgttctcgagatcgatgggcctttgcttcgaggaagattgggatcgcaagcttgcaggatgcgccggcctcgacatcctgaggagacaagaagcgctcgagggacggtggctatcggattcccgcaggctggattacgttcgaggactgttcttcgtcctccgggatgcgcccaaagacacgccgaaatcgctcgacgaagtcgctacgctgctcaaagacgttatccgtcaaagtagcgcagagcctcaagtcaacccgaatgcgatgtcgaaggtgatcgacatgctcgtactcgagctgcctagtcagaagacggccgtgcgagacgccagcaaggaatgcattgccattctagccgaaatcaagcaagtctccgtctatgaactcatctcgtcatcggcaaaggagcgattgctcgatccagcttccggtcccatcttcaataagccattgcgggcgttgcctttcggcatgcaaatcggaaacatcgacgccatcacttatctgctcaacctgacaccaagtctgccagaagtcaacgaagagttgaatcgtctgttccacgagacgattgccttggccgatgcggatgacgcgagcctgataggacgccaaacacatcatgcacttgaggtatccctgcgctctttgcgtgtagcctgcctcaaactcctgtgcgcagccatgaactgcgcagagttgttcgccaacaatcagaattccctccgctctcggtatgtcttgtgtacccttccacatagacaacagcgctgattactgtctcatttcgcagaatcatatcggtctacttcaaacacatgtattcgagctcgcctcagatcgtcgaggtcgcgcacgagggtctcaagcgagttttggcgatacaaaccaagttgcccaaggacatactgcaaactggactgcgtccgatcttggtcaatctcgccgatgcgcggaggctgagcgtttctggtctcgaaggtctcgcgcggttcttggagttattgacaaattacttcaaggtcgagattggggtcaagttgctggatcatttcaagagccttgccgagccggcgatgctgacgaatgccgccgcacgtccttacgaggacaatcaggatatcgctagaatggtccgtctggtcaacattttccgcctgcttccccccacagcaaacaccttccttcgtgatctcacggagcaggtctcggaagcagaggccaagttgttacaatcccggccgggtcctttcactgacaatctggcgttgtatttcgacaagtatcccgttgacgctaccgccttcttgctggatcgcctggcaagtccgcagctggtcaggacttatcgacacactctcgagtctggcaaagccccgaactttgtcgcggaattatcggatcaagcggacaaactgtgtgaactctgtttcagagaccaggaaaaacttcatctagttctgcccggaatccagatcatcgatgagctatccgctacctctgatgattggctactcaagcacgtcaatgtgctgcaggccctggtttccgtgtggcggagcctggtcgcactgtctaagggcccccgggacgagtcctactcgcgggttttcagtcaagagccgaccttgatcctccgtatcttcatccggtacctggaaaaacaccaagacatcgaactgctcttccacgtcgtcgaagctttcgaaatacaatcggctgtcgaccgatccgatgtgaccgatttcctctatcgcagagtagcggctagcgacaacctccaatttaagcgcgacatcttcacccacttcctagatctttacgccaaccgagatgtcagctctgcgttcaagaagaacgctcttcgctacatcatcaatcctcttctctggctcaattattcgcgacgcgatccgtcctcaaccaacgacaacatcatcgtaaaaagtgtacctcagcgaatctcagcagcgatatgggttcctctgatccacgcacggcacgggagcgaggatagcctgcacattgagttgcttcacatgtcggcgatcttggttcattactgcccagacgttgttggcgaggtgcgcaaggacatcatcatggtcgcgtgggaatcaatcaaaagggcaggggatgccaccgtcaaacacatggcatacctccttgccggtcgattcttcaacgctttcgaatcgccgtccaacatcgtcaggcccacttggcatggcttgttgcgggttaaggagacggaaggaaggaacctctatcgacaagccatcaatgttgtcgctcgatgtctccccaagcgggatcctcctcgtgccgatcagatcagctgggctgtagcaacgaagaaggtcctgactgaagaaggcaatgctacgccacagctcgttagcgtttgcgaattgctcgtaggaaatcctgatctcttctacaacagccgcgatctgttcgtcagcttgatggcaaattcgctcaccaagcttggattcgtgcctgccgctaccgcagacatgaagaaattgacgatagacatcgtcgagttgatctttcgatgggagcgtcgccgcttgaccggagggctttcggtcgcggaaacggaagccgccaacgctgatgacaacaagaaaaggtcaagctcaggcgaagcgcccaaccccaaacgacagaaggccgaggctgcgggtacagtggtcacacaacaggctgctgcctcagggtggcaattgcctgttcacgtacgcgaattgatcaccagctatctggttcggcttgtctccacgtccccggagagtatcagccgaggaggtctgaccttcagggcggtgcaacttctccgagagattatcggtcccgatggcctccccggtgtgaccgtcaagctgtctttcttccaaaggacaatggctcaggtaagccgatcttcggatgcaatatcctatagtctcgtactgattatgttatccgcaggatattaccgaagcaaattacatccaagtctctaactccgccgaggtaattgccatagtcgccaacagcaaggagatggactgggtcaaggcacatctaagcacgctgatgaagctgctggaaagcgcggtgttgagcgacttttcccccttgcacgatacgttgcggcctatattggaaaagatgttccagtgtctgcctgcacctaccgcacctggacaacctgcggaatcgatgagcgacgacattgctgccttccaccaatgggcagagaacatcgctcagaccctcaacaagccggacaaggctctcacggccaaggaccgcttgcaaggtccattgttcgtcctgcagtgctacatcaagacgcgacccgaacgtttggcagcttcggcaggatcagtggtcaagctcatcacaaagttgactctcgacttgaccggtgccaatctgccatcgaacgtttacgagaacgctcataggtcagctattgctatcatggagctgtgtcgaggtcagctagtgcagctaggcgaccagcgaaggccgtacctcggagcgttacaccacatgatcgaacactgcacgagcataccgatgtgtcgctacattctcgacatgctgcgagattggacgttagtgaagcaggatcctcttccagcctttaaggagaaagccagtctcctcaaccgtatgatcacatacgagtcgaggcgggacgagacgtcaggactttatcacgactatcttcaattgatccttgacatcttccaagaggcgtccctggcacgttcagacctgacgaaccgattggaaggtgcgttcctcgtgggcactcgttgcagcgatccagtcctgcggtccaaattcgtcgccatgttagaaaagtcgctcccaacggacgtgccgggcagacttcgattcatcttggccacgcaaaattgggaacatgtggctgggacttattggatgacgctagccacggatctcttatacgcatgtatcgagagataccagccagctgtggaagcacccataccggcggtcgaaggtcaggctgtacttttctctacgctggactctcgccttcttctcaagtcgttccgtgcgctattgccgctcgacaacgcaatggttgacgaggtctgggctgctgctttccaagcgtgttggtcgtcgctagacaggcctattcaagtcgacgtgcaaagatggtttactgcattgatctgcaaggagcaccatatggagcaagtcgagaagcggccgaacggaattcagactctcttccgaggggctctcgcttgtggccgtgccttcttgattcccccactggtcatcaagtatttcggaaaaactttcggtgcctggcatactgcaatggagcttctgtccatgggactcgagcagacagatgcggaagatctccgggacggatgtgccgacgcgctaaccgagatgtatgcagagctaagcgaggacgatctcttctatggtctctggcggcgacgatgcttgcacgacgagaccaatgccggtctggcgctggaacaaaacggtctatggcctagggctcaagaggtatacgaacaggctcaaaccaaagttcgcaatggcgtaatcccttatacggagaacgagtacaacgtatggcaggatcactggatcatcgcagcgcagaaactgcaacaatgggacatcctgaccgacttggcgagacacgagaataaccacgacttgctactggaatgtgcttggcgtttgtccgactggggctcgcaagatcgggagatgatcgagaggacacttgacgccgtgtcggatgttccgacaccccgacgcaaggtgtttcaagcgtacacttgcttgatcaaagcgcacactggtcacgaggatccttcaaacttcttgagggtgttggacgaggctatccagctctccatgaggaaatggtgttcgcttccaacccaactcagtgcggcgcacatcccgttgctgcaaatgttccagcagtatgtcgagttgcaagaggctgccggcgtcttcgagagtctgtctcagaccaaccgagagacgctcgaagccagagtaacacaggacctaaaacccattttccagacttggagggagagacttccgaacttttgggacgacatcagcgtctggagcgacatcttggcctggaggcagcatgtcttttcggctgtcaccaaggtttacagcccgctgatcaatgccaatgagccagggacatatggtttccgtggattccatgaaacggcctggacgatcaacagattcggtcacgttgctcgcaaacacggcttgtcagacgtctgcttgagtgccctaggcaagatctacgccctacccaatattgagatctcggaagccttcctcaagttgcgtgagcaagccctgtgtctgttccagcgcccggaaagattcgcggaaggactggaaagcatcagcacgaccaacttgatgtatttcgccaacaaccaaaaagccgaattcttgaccctgaaaggaatgtttgttgcaaagctcggtcgcgagcaagaggccaatatcgccttcgctcaggctgtccaagtagacttgaatctgccgaaggcttgggccgaatggggccgatggaatgaccgcctgttcaaggaccgaccagtccgcccgccagagcagcccgaaccggaaccaggcaagccgcgtctctccgagatgcaatggcagcaaaactatgcgcaagaacgcatgggctttgccgccaatgcggtctcgtgttacctgcaagctgccggtctatacaagtcagcgaaggcccgcaagcttctagtccgagtcttgtggttgctcggcgtcgacgattcaatctcgacagtatcacgggcattcgaatcgtatacgggagacgtagcgatctggtattggatcacgctgattccccagctcctactgtctttgactcatcgtgaagctcgtcacgcacgcaacattctgatgaagattgccaagatgttccctcaggtaagtcgtcgccttctcatgtaaggaccaattcgatgttaactgtgcaatacacaggcgctcttttaccacttgaggacgtcgaaagaagatttcacgcaacatcatcgcaaccagactcaggcccgaagaatggcggaggctaggcgaatatcgcaattgcgtcaacagcaacaacaacaacaacaacaacaacaacagcagcagcagcagcagcagcatcaacaacaacaacaacaccaagcgcaacaggctcagcagcaacagcaagcacagaccgcgtcacccatcgctcaatcggagaaacccagcgacatggaggtcgattcgcacaatgtgcctaaacccgtggaaaccgttgtcgtgaagcaggaggctccggaagccaaggttgttgttcccggcgaagcgtcggactcccgcgcacctgtcaccgctacagctacggacccggcagctgcagccgcgcctacgggcttgaacgacaagcctgacactgctgtggctacgacggatagtcctgcaaatgggaacgccacgccgcagtctagcaacagtatacctcagcccaacggtaacgtgcagcaatctctcgccgcgccgccgcaagctggcaccaatcctgcagttatcgccaatgtggccgccatgcaaatgtctcgtcagccccaagaactgttggaggaaattttgaacatccttaagaccgctttccccttgttggcgttatcgatggaaaagatggtcgatcacatcaacgtccggacgaagcctcctattgaggaagattgctaccgattcctatcggcgttgctcaacgaggcgatcgcggcctggactcagaagggcaagtacagagacgacaacgacctgatacccaacggaatccgcgacaaggtgcggtcgttctgcgcccaaacgaagcatgaccttcgccaggtcatgtatgatcaattcgtctcggttccaatcaccttgagggagtacatcatcagactacaaaggtggcaggaacgctatgagaaggctttggacgcccgtccaaggagggaacagcttgatcacaatgactgcctgttgacagacttccatcatagcaagtttgacgacgtcgaaatcccgggccagtacatcgagcacgtggacaacaatagcggctttgcgaagatcacgcgatttgctcctacgatggaagtggcgcgtggtttctgctactactacaggaggatcacaatgctcggaacaaacggccggtcgcatacttttgccgttcagtcaccttctgggcggcattgtcgacgggaagagagattgacacagttgttcaggattctcaatacggtactgcagaagaggaaggagagcaggaagcgaaacctctcgatccacctgcccgctgctattcctcttacgccgacacttcgtctcgtcactagtgacaacagctatgtcagtttgcaagatgtgttcgacgagcattgtcgtcgtatggacatggttcgggacaagccaacactcgaatttatcgacaagtggcgccagatttatgtgccgagcgaggtgagtggggcgtgagagaccacgttcgtctgtactggttgctgatctgtgaaggatgtaaccagactcccgacagagaccaacacacgatcgagtacaaggttgcacgaatggaactcgtcgaagaggtggctgcgaagtatgttcctgagaacatcttgaccaacgtaagcgacgtctcgcgacacgctccagacccgcatgaaattgacgtttcccgtctccaacagtacatgatccgcacaatgtcgaacccttcgtcgctttggctgatgcgcaagcactttgctctacaaactgcttcgacgatcttcttgtcgtacatcgcctgtttgagcaaccggaacccgaatcggttccacttcagcttgaagacgggattgatcttcatgacggagctatttgcgtgtaagtttgtgcttttgaagtatatccgtctagggttacaaactaattttcaccttatcttccgggacagcctttgacacgacgcgacctggtcataggtcgaccgatccggtgccgttcagattgacgccaaacatgcagcatttcatcacgccagccgggatcgagggcctgctcacgtcaggtgtcatggccatggcgcgaagcttgtccaatcctgaattcgatctggaaagctcgcttagcttattcctgcgggacgaggtcagtgttatctgtctggctacgtcatgtcgtcccgtcactgatccaactgtccacacgacttccagatctcattgtggttcactatgtacgggaagccgagcgatcatcccatttccgtcctgaactgcagtgcagaatgggtgcaaagatgcagtgaactggcttataccggcgacgcggccgacaaggtaggtctgccccacgactcgcttacgattcgtgcctcacattgataatatcggcctccattcacagaacgacactttgcctatcacccaagtcataaccagcctgatctgccaggcaactaatactcagctcttagcgctcacttccccggactaccaaccttggttctagaagattgggcctctttgatttcgtcgggtcaattgtatttctcgttgtattcgatctgtatttcaagctgtattcgtagcgtaaccaaacgccgttgatcttgcataccttctctgatgcctgagagtgaccgcgtttataaggctgggcgtggtgctggggtaaggctggacgcagttcgccgaggactcagcatggattcacgtcaggccgcattttttacatttccatctcttaggcggcaaggtggtcggtcttgatcgcatggacatcctcgacgctaacccggtcccgcttccctatcctcgacgggtcacgacagtccatcggcttctgctgccgctgccagtcagtagcagaggtccagaagttcatgataattgcctcaacatggcgcgttcgttgcaaaatacgacgtgtataccatatatatgacaggatactgcacatgtcagtactatgcagcgacggctacaaaggtcggacgagccggttctcgcatcagtcgaagcgctcctgcaacagctcgatacctcctacattcaatctcctggtcgcatcgatgtccattgtcgccttgcgaaccgaatgaaccagggaattgggaccgcatacggcgattccacagccgtgggattgcgttccagctgaggtgttgtattcgagggatgaatcgatcaaatcctgaagaaggtgatccattattggcctggcccctggtacgatactgattcgcgaacccgagccgcaagaccaagcgagctggggttctagagtcacgccgcccgccatggttcctggtagcgcaaagggcgcgttcatcttctcttgcgtcgatgggctgagtagatccatgccgccgtgtggcggtggtcgcgtgacataaatggtgactcgaatcttcagcgaggaacgcttgatatcctcgatgagggatttgaacgtgatcatgagaggccgagcgatttcggccgttctgactacccatatgatgtccaagtgtgtcgcacttatggcatcttgagaggctgccttgcagatcagatcgtgcgccatgcccaaggtatgtgtgataccggaaccgcctgccactagcatcacagaggagtatgaagcgaagagtgaatgtccgcatccgccgtaagggccttcacagagaacggtgaagcggtttgaggcacgggtgaccgcctccgggtcgtccttgtttagagccaaatcgtacaaggcctgagtccagccgccggtctgttgtacccaatgtaagcatctggtctaaggtcatctgatcaaattactgacccgcttaacaatcatcacgagcccatttgttccgggcgcagacgcaattgtgaacacatgaccttcgagaaattgtaggcctttctttttcggctgtaacgtggccatcacatggtcagcacagcacatatgtggttggcattcgcacacgcaccaaagctggaaccctcagtatgacatgttgccccgctctccaaccagattgaatatccgggatggttactagaatcgaatctgcgcctgccatgactttgaattcggctgtagcgatcttagtctttactacgcggcagacgagttcgaacgcgtaaagtccggctccagctatacagtatggaactgcttctggcacatgcataccgagcccgagtagaaaggcaacaagcccgaggatatgcgagatcatgaaaaggttgtagagtcgacgtcgtaccgggggaagggaggtgatcaccatgaatgtcaaccctgcgacgcctgttaacccccacatgatataggactccttggccttggcgacgaagatgccgctcttgccccacttgtagcctttggtacggtcggtcgcgtgtattagccataatgacgagtgcttcgcagcttgctaccagaaacataccatagccccctacatggagtagcatgcaagcaaagcaagctcgaccagaaaacttgtgaaggttgatgacagcgcggctttgtcctcctccgagcaagtatcggatagggctgtttcgtccaccgagaccgataaccaacggaacctgagccatgctcatcgctccacttcttaacaagtccggtccaagcggattctttttggcgttccactcccactcggtgttcttgtagaagtttgcgaaagcgacgacacctgcgtaaagcgaatatacgaaaacgtccaggaacgtcaagcgcggtagcaacgagggtaaaggtacccagaggagtatcttctggaaagctgggatcctatcaaagaggctggggattcgcggaggaggactgagctgatgcagcacggcctcgttggcgatcgtcatccttttgaggccttctccgaaacgtgggcttgcggtagcggacaggaggggcgcctccgtacaagccgagagtaatccgctggcgggaccggatccttgcaatgtcgcggatgtcagggctgccgagatggctgaaggaggaagcgtgcctggcgagtttcttagcaattgcgacttcttgagatacatgaacttgtcttcatgtccatcaaggctctcatgaccgacgcaagtggtttcttgtgaatagaccgactcgacagccgaggcgaacgagctgtgccgagtcaagcctctgctctcactcccattgccattgttgacgttggtatcgattcggccaaggttgggtctcgagtcattccgacgatgagtctggtagatcggagcagcttgcgaaagggcgggcaacaagaaattgtcgtcatcgtctccgtcgttcataggcggagtctcctcgcacagatcctcaatggtggacagacggtgtttctcttccgaggacaggaagcgcggcgccacgaaatgatcatgagccactaccgctggtgcggggcgtcgaatagacgggtcatcaatcgcatcggctggcgtcctgacgatctgaacgggcggatactgatgggacacattcttggaagaccccttagtctttgcatcgtctgaaagtccactttttttcaggatccaaccgctccatagttctccccctacggtacgtttcctgtgcagatcggctcgagtgccaggctccgcctgctgtgccgtctgaccctgcttgtcgcctttcctagcgaatcgacaaaccctactcagtggagagaatacgagacgagcaaacaccctaggctgatcgagcagaaaccacagcccgaaaaggatagccaagattacgtaaaagaccatcggcatcctccctgtgtcataggcatattagcgatacgccagacgccttctaactggacagacttgccgctccactttgtcctgtaagccatgacgatcttttgttctggtgtcaataccctcttgcctccactggaagcacccgatgccgccgccgtagtggcagccgccatcgaaatcagttgcgaagccgtcgtgtctgcgatccgaacgaacgacgttgcagcggttccagccgctaccagcgcagtcggtaaccttgtgggaaggatcaaagatgcagcggttgaagaagccatgtcggccgtgctgacggcggtgagaaagcttggaacagacatctgggccggcgagatagcgtctgcaatatccgtaatgtctgttaatcttcgatccgaaaaggacgacaccaagcggtcgtgttcggcttgaaattgtaacgagcgtggaggacaagacctccggggaccagccctgttcaggtgacggagccgtgaagagttcgctacaacgatgccggtctgacgctagtcctgaacggagaagcagtggaagctattctacctttcaggtcgttcagtgaactatatgtcagttacctatctgttcagcaccgtttcctcccctagcgatgctgcgacggtgactcacttctttgatatgacgatgatagagtactagtaattgccctttgccaaggagttcagcgagggagaccgggtgacgatcgatcgggagatcaagtgatcaagttcctttgcctgcgaccagcgaccagcgaccgatcctgtttcaagacagaagccgcgacgacggggaaggatcgtgtcagaagtctcaagatgaatgtcgtgtcacgggccagccggtgcgacagacgattttttgcgtcgttcggtggatttgctgtcgcttgtaacgcacgcaatcgatcatcttgacgttcacgatttcgttgagcttactttatgagatagcgacggcggagcagttgatgatgcgaaactcccgatcgagccatcacacacgcactccgcctttgatcccctgcgtcggctcctctgcgatcgcgtaaccctcctttgatctcgcttcggtcgagacgacgaccgaaggccttctttactgaaatcacacggatcacgcgtttcaggggatgaaacacgtgaaaccacggagggaggccaaggctattgagagcccgcgcggattcaggggaactaggtgggtactgcactcgtaatcggaaaatgctgtggctcgcttcccagataacaagaatctcttcagtcggaccaatactcggctttggtgcctgtacggagatcgttcggagaggtctgttcctttgagtatttctgcaatctgttatcgtaccctacaatcgctgaaattctacatatcgacctgcatcatctcctcatcttccgcttttgacacgtcagcatgaagggaagaattcggcttatcgtgggccatttccgcttctcccagatgctcctcttgctcgccctgttcttcccctttagcggcattctcaccagatgtttcagatctcaaccccgctccaacgtatcggatgacagtcgtcctgacaatcacttcttgctcctcctccacgacgtcttccccattcgcgcccgatctggtacgtctccggacttgtcgggtcgtcgtctcggttcggtcgccattaacgatatcctccgcagtcaaggttcgtgccagcagcttcacagacgactttgaaagctcctttcgagatcgtgaaatagacgattcggattgcacctcttcaggcgtttcgatcgtccagggtctatattcggatgtaccccgtgtcagaaaataaacggccctgatttcgcgtgagggactcggcttactctttggacgtgtttcttgtctttgcccgtggaccgaagaggacaagctgtttatcctcaacttgcgaaccagcccggccattctccagctttcgctttctcgtcactctgcgggcgtccgcagctatagtcatcgggggcttgtccgcttcgtcgtcgcttccctcgcccaacgcttgcttgcagcgccatctgagttcgcgagccagcgcagcagggtcctgcgtcatctcggacgggataccagcattgattgatttacgtattttctcatcggcggacaagtcttccatgatcttcacctcccggaccaagaattgagcgagatgcaggaaacctttaagcacaacctgattcgtctcgcctcgatgtttattgtccgctttccgctttcgggcgatcgactccctcagtcgttgacaaaagttcaaagccgcataccagcagagtctaagcacagcaaagcgagatcacgtaaaaatcacttcggtaacgcgcaagatcggttcattcccactgaccgatcgaaaaaagggaagcgataccgctgcggtactttcagctcaatttccatatttcgcaggcggatttctgcgaatgccaaagtagatttgagtgtcatgggcaacaaaaggcggagcgagactgacgattttcgatattatatctgatagcaagaggattgtcagccttggtcactagcgaatatcctggtgcgaactcttacgagtgcaaaaagttgcctccaaagacgagcgaatcgagcggcgtatgctaatgacctagatgagttggtatatctgtatcgtatcggtagggagtttacgtactaccgcgtgtatatatccagccggaatgatcctacagaacgaaagaacgaagatcaggaatcttttctgtctgtagcgtctggagcgatgattctcacatggtatcccctgccacaagtgtgacttttcggacctcgtcgactctatggatgagcgatgacatcagcctccaggtcagaatgccagtaagcatctgcttacaggtctcccagccagacgctgttttgtgattcttccgaacttgaccctgccaaaagattcagattctcgtgcaagacgactcctcactccccgcatgactgacactttgcatatgcttttagattggcatcggttggcctgatgaagaagaacgtctgggaatcacacttgatcagcatggccagccttcccaagatgcataccaggcttactttcgatccggtatgtacggtgtaatagaccgatgtcgaacccatgtcgagatgccactccgtaaacgaccctttcattcccatcagacaatatagttgaacctttggccaatccgagcgaccttgctctgtcacggtctccgcatcgtctgctccggttgcatcctcgtcctgttctgccaagccagcggaagtttcatccacgtgataattccgcctagctttccgtttaccaggcacgtcgggccagtattgatctacccagtcgatctccgagacgagcttgggtggacggatctttttggccaaatctgtcccagaaatttcgagcgagatgacgttgtagaccttggtacgttgaactgatgtcgaggaattgacatcggcttctttgctcgtatgatccgtgatatagtctgcccactctcctagagaccatttcaagcttctctgcgtggcgacgtctatcacatccagcttctgatctcgcccgaccatgttggcgacgtcttgaaagttgagcttgtgatcgggcacacgacctccaagactggcgaatcctcctttacttttgggaatgatgatgggttcgcgatcgggcccaaagaaaaggctaggagggggtatatcgggcggcgtgtctgtcgaatccagccacgccttgtccagacaagaaccattaacctgggtaaatggtcctgaagagataaggatccaaatcagatgccttgtttgattgtgtttagctgactggggatgctcacgatcactgatggtcctccccgtcttttcgggattagcgatcaggtctagccatttgttcgtcgacgtcgggatcgaattgtgcaatgcattgtaatcaggttgtcgcagagctgcttgtcgttttgggcgggattttgccgagccattaggacggtcttctccgttcaaggggctgtcggcggtgagcgggtcatgtttgcggccgactgggatgggaggtagatgcttgtctgcccgtagctcagctttgggtgttaccctggaccttcgagaagagctcggcttgtttataccggacatgcatgatggacagtacctggaaatattgcaaatgatatcagtcacgactaccggttatgctcacgagtcagagggggaaccgacgaaccaatgcttcaagtaatgatcgtaacgccaaaagaaggaccgctgaagcagctgttcgacgagaagctgagggaaagtgcccgtgaagtcgtggatcttggcagggtcgctgctatcgagttcttgactagtaagagcttccagcttcttagccgtgcgtccttgatattcccgtcggacctctcgggctagacaggccgtatgaaaccactcttcacagatctcgcatcccagccaatacattactggcttttcccgaggttccacctcgatggtttcatgtccttgtgcatctatacgtctatccttgaacgagtccgatgagaccgacggggcctgttgatcagggcagagcctgcaaaggacatccccctcaacatcgtcatcctggtggttgtcgtcgaccatgaccgttgacagcaacgcggccggttcaggctcaatgaatttcgctctagtgaacttcaagatatcctagagtctttttatggcattcaagggtctacagagtgtctagcagctagtagttgattgacaggctcgtgaacaatagtaacagtgtcaacatcagtttaccaacatcggccagttctcaaggaccggcatcgaccgaacttttgcacccggtcgagatctaacggaagcataatccatcgccaacttcggatggtgatcgacatctatcgatgcctacatcgaatttcaggcctaggcatgattgcattgctacagcataccctctacacctagcatcatgagtatccgcgcgtatagactgacgtgccgttctggcaacttccacgtctcttcccccacccgctctgaatgactacgaatgtttcccaactcggcggccatcttgcttcgcaactcgttcgacgtcgtcaggatgatgtttgacaattcgaggtcgagtttcatcgatcgtgtcgagaggttggaggaaccgataaaagtcgcggatggtttctgggccacagtcgatccgctcgccccggcaggggatagccatatacctgaaatcgaatgaggcgatatgagtcccaacgaccgtattcccgtaaggtcagcctgaccgaacgaacctttggcatgataagtccagccctcccgcttccattcgttcaactcgactccactacccgatccatcaggtcgtgcagtccaatctcggccgcgtcggacgagttccttgtggaactgtgattccagcaaggtatagccctctggaatcagtctcgacaccccggccgagccgaaaaatccgtttgcctttgtttcaagatcgtgatccaataacggtcagtcacatctcggtccgaaacgcagcgcaaggtaaaactcacttcgggtgcagcagctacaatcctgtacggcgcatttccttctagcacggcttttttatacgtatgatacagcccgaaatacccgctcgtcagatccacctgggcgcttccatgactatcgacgcctgatgcggaatcccgtggcaacatcttctcggcacaggccaggaatttaccgacgccgcgttcctcttcgcctacacccagcgctccgccctggatcatcggaaagatccacgtgtccacgtccacccgtcgaccacgcctgatctccctccagacccgctggaaagccgttatggtcgccagggcgtgatgagaaaagtacctcggatgtaccgacggttcaggccagacgagagcggggcgggtgttgggagacttgtgcgcataatcgggaagtggaacgagagggatcaggtgatgcggtgaagatgaaggttgagggtgtggtgtcaaccggtaggcgtatgaagagtagagacgttgaagagaatagaggtaggagaggatgctaggttgattcttgacgtgatagtaccgatcttgtcgattcgtaaagtaggtatcggaaaggtttgctctataggagatgatgtaaaaagtcagtgctcgaccacaatcgtcatggagagggttcttgactgaccccgagaagatgacctcgtcgtccacgccgtaccacttgcaatgccacaaaccccatccttcatcataacgcctgggtactatcctctccacgagccccttcagcttcggtgatcgataaaaacaagcgtcgaccctatccgggaattcggccactagggggaggagcatggtcgccgtcgagggtctcggcgattgttccctggtcgatctcaacaggtccgtaatgatcgagacccggagatgagggttattcgtcaaggcttccctgagggcttcaatctatgtcagtgaatgatcggggtacgtcagcgatcgacaattgcgccgagatgaatctaatacggtgaggaaagacttgacgagctcacctaccaattcaccctgctcggtaccgatgtacagcgccgagatcaatatccgacgcttagccttcttgatcatggactatctcgcaggatggtgatcgagttagttgcgctcaaggtagcaagccgagtcgagcgggcgtactagcaggcattgatgaaactcggccggttcgaagagtacgtcgatctcgtcaccccggaccccgaaacatggttgcagcgtggtcaactcgtccttgagctgattcagcgcggggtgttcgaatcgaggttcggtgtgtatgctcgacgaagtatatgtcctcgatattacgggactcgggaggggtttgacgtcattacgtcgagagattgtcgtgcgggtgcatcgagttgcgaatctcgttgttctcgacgaggacatgatggatgtccgcacgatgctatttgtgactactcgactcatcctgtgtaaattgtgtgagttcctgccagtagctaaaagtcaatcagaaagaaggtcgttgaacgagaggctggcttgcagcttgtagctataagattgagttacggaggacgttcattcaacctctgtctctccctccctgtatgctgtttatatttccgcgtcgcccttcccttcccgcgtctaacacccttagccttagcctcagccttggcttgacacctcatcccccagcagcgagcatctcgattcaaagcaagcatattcgttcgagagctcggctcgtattatcatatggtggataccgttacatctgtccggtaatttaatctctatgcacgacgcatagtcatcgtatagctccacaatagaagaacgatgaagctctctttggcttcgctcaccggcctgatctcactgctcgccgcatcggtcagagctaccacgcaagacgactttctcgccgaggccaatgacgcaccgaacgggatcatcacgctcgattcggcgagctacgaacgtctcatctcgagctctcacagctcgccacggaattacagcgtgagcgtcgtgctcacggctttgcccagccagttcaagtgtcagccatgccagtgagtgcggagcgaacgtcaatgtcgggagaaacaccgtggccgacaacgtactccccctttcttcttcgcgcgttagcacctttgacccggtatacaagaccgtggccgattcatggaagcgtgcatctggggcggaacgaaaggatcactttttcgctcagctcgatttcaccgacggtcaggccatctttgccaaggtaggcatcggtaccctgccggacttggcttcttgattcggaatcaagcacgactgctgacgacttggttttctcccccgaccgtgtgtagctgggcttgcaaagcgcacccaatttgcaatacttcccacccaagactggaccccggaagtccgactcgaagcaggactttattacctatgactttagccgcaagtgagtctgcttcttccacctcaccaggccaatctgccaccagccgagacttacacttcgtcccgccccctgtcgcagcgggtttggcgtggaacggttgcacggctacttgtcggacctgaccccgcacccgttccccatctatactccattcaacccgatcccctacatcgtcatcccgacgagcatcatcgccggaatcgccggtctctactttgcctcgccttacatcgtccccatcatccaatccaaggcgatctggcagggagcttccctcgtcgccatcttgatctttaccagcggtcacatgtggaaccggatcagaggagccgcttatcagggaccgaatgggcagttcatccagcccgggtttagcacgcaatatgtcatggaaacccaagtggtcggaggcgtctgtaagtccgttcgtcgtcagccttgtcaccgacgatccgaaccgctgaaatgcgggcgtcatcatcgctactacagacggcctcttggcgttttccgccgtcgccctgacttcgctcgcacccaagatgctgggatcttaccgacaacgattcgccgtgtacatctggatcggggtcatgatctttgtgttcagcttcttggtcaagatcttcaaggtcaagaacggaggtgagtcggggtttcacgcgcgtgacgtgacggtgtcttgtacgggtggacagcgtggaccaggctgatgagtttatcgacgcgcttttgtggttcaggttaccccttccgactattcctcggatagacaaatcgtcgtggttacatgtgatagatcggatcttgccaaacatacatatatcacacatggtgcaatgatcgaacgtgcaatcaattccaaacctgattgatcgactcttccatcgataatgcattctgctcgtcattctcccccttgcgttgaacggccatcgaagcgcttgaccggcagcgggggcaacatcttcttcgaccttgcagcaaagatactcaactgccgttctttcggccgagggtcctaggtcagtactagaggacgccttcagtgtcaacaggtcatatcttcttccgttagggtcaattgaaagcaaggcttcaactggcgctggagacaatgcgtaaggggacgtccttgatcaaggagcggacgattagctttgatctgtgcaaagagaaaaagacgctacttgctcaactcgccaaggaaagaacctcactccaggatggatctaaggcgcttgtcgaggaaaatcaggcgctcctctgggataacgaggggatcacccgaaacgacaacaactttgctcatgctaacgaggagctcttccaagaaaacgaaaagaatgtcaaggaaaacagcgctctggaccgggaagacgaaaggctcatcgaggaaacatggctgtcgtggtaatgtcgctgcgtcccaagttcctcttacggacaggccagtccaagcacgtctccacgtctccgacaggaaattcgttgacaacaaggaagtacctaaagtgatcttggcctttgagaagcatgcgttccttgcaagcggcagaaaatcctccatgttcacttgatcaagtgacaagcgggcgaagatcgattgagaagctgcaagagtaccgaccgcagcacccgctggatgtacagaaacggcgtgagggctgatcacatagacttttcgatcatgctcgtctctcttgcacatacatctttgatgcttaatacgtacaatcacctccatttcgacattgatctccgtcccgcctcgttcaaggctttcggccgagcggcttatcctcctcgctactccagctcaactgatatccagccgattcctgcaagcgggtccatcggcatcagtaccatgtcgtcatccatcatctcgccgtccatcggtcgagttcagaactctatgaatcgactcacatccaaggaccaacgctcgatggcctccatccccctctttccccaatcctgcataggatcgtcgcccggctggagatcgataatctcgatcaaggacgagttcttggaggcgatgaaaccttcttgcacggcgaggaggatttgttgtttcaagggcgtgtagaacccgttgactgtcagagggaacgccgcggcgggaggtaagatcatgacatgtcaatgtcaggtgtgcctcggcagtacggtgctggcagaacttgccgttgaggacgacgacgggtagacggtggataccgagttgagaccacgtggtcatctccaagacctcttcaaacgtcccgaacccgcctggaagcacgatgaacccgccttgcgagagctcggccatgcgttgtttcctctgtacattcggagatgacgggaaggtcagggtctagatgcatgggggtcgtacacaacgacaatagactcacctcgtgcatggtctgtacgatctcgttgacgaacctctccgacctctcttgatcgacgcggacgacctcttcccctgtcccctccttgctccctgccggagtctcctcgtgatcgtcgtctgccgaaggctgagagcgaccgttcgtctcgttcttggagggggaggaggagcgcaactttctgacggctcgttcggccgctcgaccggtcagagcttgagggatgatcccgtggactttaccaccctcctcgagcgcggcatccgagacgaagcctacgatcgagtccgcatgggtttagctcgaatacagggagaagcattgtcgacgatccgtgtgacatgattgaaagcgggagagatgctcacccatcatccctcgtactcctccgccgtagacgagggtcctcccggatttggcgatggattggccgacgctcctcgcagctgcttcatagacggggttgactcctggcgaggacgcgcagctgtggtgaacaagacgtacggcattcgaccaggccgtgacaggtgcgatggggtgagatgcatcgacgtcagtgtaatgtcgtcgtcagacgagacgatcgggcgagacttgcaatacgcagatgggtgcggaagacatgatgcgacggtacgagtggaggtgacgttaggagagattcgctcgatgttcggagcggctgagcaatggtgttcaaggtgtgggctgatttttatagggccatgtacaagtcgagtcaagaagcgagaagctgaggaagccttgcgtttttacgattatcatcgttggcatagcataggaaggttccgatgttgttgactcggagatcgaaagctgggtagcgacgtagcgatccaacagtagctaggatgactgacgaataacaaaatggtgaaatgaaatatatgcgggacgcggaagattacttggccgcaataatcgtatacgagagcagatcgagtgtacaaccagcgattcgttcatcatggcatccctgtgcgttcatggtgcatggacttacacctgatcgtaaattgtaaacatgtcaatcagcaatcaatcgatgttcgatctgcctagtgatctgggtgatccccgctaatactcgtgtgtgtgtgtgtgtttcctgagctggctaacaaaagcagcaaggtcataaaataaaataaatgtcagcttcaactcgtcgcgcacccctctcagacagagtgacatacagaagagcatacagatacagatgttcttgttcattcatcatctcggtcataatcatgcctctagctctcgtactaaacgatactgaaactcgtcaaatcaccaactacgatgcctcttccagtcgaagatcaattccccgagcccgaggcttcctcctcctcggctccccgtccgcctagggaacaacccaagatcagtaatcctcaacatttacactcgttactcgacatgatcgccgacggggatggcgaagagccccccgaaggcaccacaacgtcgggtggaggtatacagatcgaagatatcaggtccgatgacgaggaagacgaagaggagggggaggatgaggaggaaggggtcgacgagtccgtcggagctaccgcccctgccgagtcgagcaagaataaaaagaagaagaagaacaagaagaagaacaagtccaaagcggtcaacaagctcaagtgcgttcgttcgttcgtgcgattcctcacgagggaccacgacctctgtggccagacccgtgttcccgagctgatgagcggcgccttgcggttcgttcctcagggagatgatcaaccccggtgagaacgtcccagacgagctcgtggacgccgtgaaacgggaaatgaagcagaacccgtccacccagaatgccgaggtcgatgacggtcagtttatcgcgcctcagccattacgctcatggtggtgtcgtcagtgctgacaaagacgtatgtcatgccccgttcattcccaactcgcaatgacgagacatgtagacgagatccgaaaggcgctcaaagcgatgaacctattaaagatcctcgagggcaaggaggcgctagggaacaagtcgaacaccaaggatatcggggaacacaaggtccgtcttgccctccacgtttcccttgatggccagcgctcgactcttacacgctgacccttcggaccgcttccctccccgcagttctggaagacccaacccgtcccgcagaccttgtccgagaacctacatcgggcaaacagggcgtccgtaccccccgcaccagccaaccaggagccggatggacccatcgacgaggtcaaggatgtggcggatgtgaaaaaggagcctctggcattgccaaaggggtacgagtggtgtacccctgatatcaccatcgatgagcaggtgagccggcagcaatgggatcgccgagctttgacccgctatctgggtaggcgctgaacgatgggtatgggtgatgcggcgggtagtgtaaagagatccagacgctcttgtcggaaaactacgtcgaggacgatgacgcctcgttcaggttgcactactcgaaggagttcctccattggtcagtctcgacggtcatggctctctctagacggtgttactgaacggatatcgattcgacagggcgctggcaccacccggctatgtggcggattggcacttgggtgtaaggcagacgagtaacaaaaagctcgtggcctttatctcgggtatccctctcagcacacgggtacgggaaaagtgagtcctaataccctgcgcccgtcctcaaatcgagaacgctcgcatcgctcccgtgctgacatcgtccatgagcgctcgcacagcacgatcaagacggccgagatcaactttctcgtcactcacaaaaaactccgatcgaaacgactcgctcccgtactcatcaaagaggtcaccaggcgggtcaacttgcaaggagtctggcaggctgtgtacacggccggggtggtcctgcctaccccgatcggagtgtgtcggtgagtagcctcgtggtccacgggtacgcgtcaatggcgggtgtctgatgaccagcgctgtgtagatattatcaccgaacgctcaaccctgtcaagctggtggacatcggcttcactcccgtccgacgtggggataccgtctcgcgtatggtcaagcgcttcgctgtacctacgtccccctcgaccccgaactttagggaaatgcgcgaggaagatatcccccaggtcctcgatctcatgaagagatacatggccaggttcgagctggagcaaaagtttgataccgaggaagagatcgcgcattggtttatcagcggacgcgggacgggcgagtatgtcaagggtcgaggacggcagggtcaggttgcctgggcctacgtggtcgaggtgagctttgcaaatgcgccccgtaatctgcttttactgcagggaccgacactcatcgtgatttctcgtgcctggtaggacccggaatcgcatcgcatcaccgacttcatgtcattctattcgctcccatcgctcatcatgaaacaccccaagcacaaggatctcgggaccgcctacttgttctactatgccactgatgctgccttgtcgccatcagggagtcaaggaggagaggccaaagccaaagaacggttgagcaagaggttgaacatgttggtcaacgattgtctcgtcgtcgccaaggatgtgagtagtagtgcaggtgaggccgcttctcgaaaggtgtttaccaatcaaaaaatcgctcgtcaggctggtttcgacgttttcaacgcgttgacgatgatggacaacaacttgttcttgaacgagcaaatggtcagtcccgtgcgattcgtgtgtctcgtcgatgacgtcgcgatgccaacgttttttcgcctttcgatccgcgcctgcagttcggtcctggagatggttacctcgtaagtcccccctcacccgccagaccaggctgtaaactgacctgcctgctctttacgtcctcgcttgttgctccagaactgtgagtcgcgctcggcacgacgaaatcgcgtctcggacaacccgttgatatccttgtatcacagactacctttacaactggcgatcggcccctatcgatggcgccgccgatggcgtcgatgcgctgcggacatcaaatatcggagtcgtcatgctctaaatggaacaccaaattcacgaaacacgcaaggaggagcatgcgagacgtcgaccgtccaagggttttacattcatgactgatgcacgcggaaccgccgccttgtaccaaaagatcatagaagggttttaatattttatatccacaagacatacgccgagaattataacactacgagccacagtatagacaagatacaagttcaggaacaggcgccgaatcgggatacaagtgctagttgccactgacgaaggtcagacaaggcaaacatcgcgcttgacccgagatgacacatccagactcgagcgtaactctgggtctggaaaacctgcctcgaacagtagccaaaggcttaccgtccaagccctatcattataatctgaagtcgttcagtcccgattcccacgtcaagataccgactggcctttgcccgcccttcgtgtttccggcctcccctcccgcccaccccgccatctagaagcgggtacagggaagggggggtcagggggggcaaggtggggagggagggtcattcccccccccccccctgcgacaccttctctgcgccctgacctttatcaacccccggcctcaactaacaatcgacacctttcatccgatttcggtccgcctttacagacatggaatccactcccaaaaagatctctacctcgggcgaccgaatgtctcgtcgagaagaatggagaatgtcgaaaggcatgcccatccgtggagaacgcaaggggttgaacagacaaggaggacagaaggctaggaggaggagtggaaggcccgcgaggagacgatgagcgggtcgagtcgagtcgatcgaagagtctcgtctcgctccgagattcagatcgggatcagctcgggatttctggctggagcgccggtggatctctactcgccgccgttcggacgacctcgccacctggatacgacccccatcgtcgcctttaccgtcgccaccactaccccttctttcacaccggacgatactcgccttgacgctctttttgtactaccaaccccatctctcacctccctcgccgctgttgtatatcccgccactcttacctaggcgcgcctcgtcccctcagcccctcttacctttttccgtacgcgttcccaacccgggatcgtaccatgttgtcatattaccatgttccgacgataacgagtttgagccagctcgcgctcgatacaccgtcttgtctgatagatcaagccggagcgatgtcatgtcttctttgagcgttgtcacggaattcgtagatctgcttgtagtcgggggacgtataccctgttatcggtgtggcttgatcttcctaccttgcgttcctccttgactggcaatcagtaccaatcagtatcagtcatcagaaggggaaggaggaacattgtcgccgagggggaagagcaggagccagagaagtcaaattcgtcgactgacttgaacgtcatgttgcatgcgtcgagcttaagcgacccacaacatttcggagttgcagtcctccgaggctggaatggggaagaaagggagggtttcacacgtcagtatgagaattgataccgtcgaatagataccaccagaagaagtgaggcaggagttctctcgagcaaggaaggtgaccacgacgaccgacttcaaaatcgcctcctggtgggagtcgggtgcacgaattcatggggctcgaaggggaacgatacatgtgaggcaatgaatgacgctttgttcgacatcgtctgatccaactcttcccgcactcaattccgctcaatctcaaacctttccggcctttgctctgtccatcatggcgcgtttgctcatccagccgacccagtccttgagtacagcttgacgcttcgcatcatcggcctcgtcgatgccaacctatcgcgtgcgctttgacatcagttccgggtcacccagagtggttgtagaaaagagagacataccttggtcatgacgtgctcgtacccctcgtaaatcttgatctccttctcgggactgttgatgcgttcgtagaatgccatagtggcgagatgagatgtcgctcgatccttgtctccgtgaatcattcgaatcgctgaatgaagtgaaggcacggtcagacgggcgatctaatcagaggatctaatgcaggactcacgcagcttgatcatctcggccttcttctgcaactcggtaaaaccgtgcaaaagagacaatccagttgatgctcgcaactttccgtgataggtcagggctgaagccgaggtcatcttgtcagtgccaatcacacggatagcccgttgctcaattccgtcacatacggtcttccgcaaactctcgctcgactcttggatcgtcgctgactttccctagaggtggaatgatgatcagaattacggttacgctcaagctctttacactgctatctcacctctgacagcctcagccattgggagactagcagcaaccttgacgagggcctttgccgcgagctcgaccaaggcgttgggtcgcgaatcagcggcgactacggtgtcagcgagcaacatgtttgttagcccaatatatacttttttggtcatccaatctgtcaagaacgcaccttcgacaagtggacacaacaccatagctcctgcaatcttgggacgatattccttcttgggttcggcaggttgatcatcaactccgctgcctgagccagaagatatgatcttctccacgtccgatgtggcaggataggtgatgatgtagtagagtacggtccatcctcccatcgaagccctgcataagcagacacgaaagtttattctttcgtccgaaatgccaggcgagaaagttcggctacttacccagtcaaaaagacttctcgctgttcttttccctctgcaacatctacctcgatgacatccttgagcacgacgtaaacagcagctgtcaaaagatgcgagtcggtcaagttggaatggataccagtagagcgaccgtactgtcgagtgttgttgtgtcaacatcttatggtatcatgccgcacggaccagcgactgacgcttggcaggtccgggacgatcacccggaagcccctttccaggaaataacggcaatggggagcgtatcgagcactgttggaggatgattcaaatgaatcgccaaaccaaattgtctgagctcagaaaacatacccgtattcattgagacctgccagaggccaatagatccatcgacgatcagcggatgaccgatacaggctcagatcgaccagacgggatcttagcttaccgtgtacgagaaggatgtccacacccagcccttccttgctggccaagctttcctctttcatttcccatgacttgtagtagacccatcgaccttctctgatccgctctttactcagctcctctggaaccagcctgatgtcctcggcgaactcaatgtcgacgctatcgggatccgctcgaccatgcaaaaagactcgacgccgccgggtcttgatcgtcgggtcatcatcgagagcttgttcaggcgcccagggcttggtgaggtatctcccgtatgtcggatcaggaggagtgtataaacggaacttttgcaagcccggctcgaggatatcccagacgacgctcggcatgctgtgttgatggcaaactcttgtggctgttgagaagggacgaaaagacggcgctgtttcacggatatctgcttgtaaactggcgattcgagcaggtgttgtcccggactgtacgaatggtctgaaggatttgctgtacggccgtacgatgatcggtctagacatgcgaagaaaggaagaagagtcagagttctgataggcaatacctttcatctatctcaccaagctcgcaaaagctcgatcaagtggtagccgtctgagggatcctcagcgggcagaacaggccgtgtacgcgtaatcatggcactcggccgccgatcatgtgaggaccggcactgttcaactatcaggcaggcagattctcgatatttgtcatcgcaaagggtcgttaaatgtcatacaaggtagtacttgtcagggcgctgaacccaaagggaagaaacgatgcgaaggaaaatatgtggcctcgaggccgggtatacgggtcacgaagcgttgtcggtatacgggtatcatcaaggtcgatattcgttctaattcaagtccggagatttgctgtctaggatgttgtaagggggcggcgcaggactgcttccaggcgttgggctcatccagtcaagggctttgaggactgatagtcgcggagaaggcgatcgatccgactcgtcttccgtctgttctgggacgacgctgtcgtgtagactggtcgaattggtggtgtaaggtgcacctgcgagcgcagagttgcgtccagacgttgaataccgtcgaggtgcactggtggtggcagtgcctgccgcggtggacgccgatcgggcatgtcgaccggccgactcgtccgacatgttgggcacgaagaagaacatgccgttggatcgctcagtatgagttcgacttcgttttgattgccgttgaggcaatagcattgcaggaatggctttgaccatctcgatgatccgagatgtgtcatcgccatcgctctcatcagtgtcgacgctcgacactgaaggtgtggcggtacgggatccgtcgtgagactcggtggttggcaagatcgagaccatatggtacgacctgtaacctgtgcttgccatgacgaatttcctgaggctccttcgacctgatcgggcggtacggttgttactgcagaggaagcgaagtccgccggcgataaagacaacgagcccgacccaaaagactttcttcccgctcgaaccaaggaaaacgatgaagccggcgtcgtcagagtgccaggacgatccgtaaaagtgtgagaagaaggcatgaggggcttcagccgggctggcattcttgccgtagagcgatttcggcaaaatcctcacatccgctcgaggatgagcaggtgtgagcgggtgggccgatgtgtacaggccatactgtacagacaggaacattggtctttatggggtgatgcatagcgaatcagcaaaacgattcaccgctctctctaaaagcggactcaccctgtcgaaaacatgactgtcggatagttggtcacgtatttgtggttgaatgcaatcagcccgtggatggtggcttccatgaacgaactgcgcttggatgagaacatcaagtcgtttgagaccccgacctgtggatggcaggaaataatgagcatcgacaccggggatgacgaatagctcgcttatggcttacgggcttggtcctgggtagaatgacatcccagtcaccttgcaagaggggatccagacgtctcttgcaaccgatatccaagtccatgtacacaccaccgtaataatgcagaacacttttatgtaccagacgcgaatcagcgtttattcctctggatcaacaggccgtccaacttgactcacaagtaacggatcgcgtctgccctttggatgggatactcgtaaccctcgaacgtcgccaagaaggagggatatttttcggcgataaacctgcgggacgtatcatcggtccaaagcatgtactcgctgagatgcaaaggcaaagcgcgtaaagtcagtaaaagttgataaagcgtcgtctgtcggtctcgactcactagtctggcatgccttcgcgacaggctttccagacctttctccatttttcaggcaggacgtctgatttccaagtctggtggatgagtcgagggatagactcgccaggcctacaaagagtggatggaaagtcagcgattagacaagtcggaatctaggtgccgccgttgaacgcacagattggtcacgttgctcagacgatcccactcggtctcctttacccgtccatcccaatcgtttctcatccaatagctacccgttcccttgccctgagcaccccaaacagcaccggtatcatcgactttccagtctgccccaatatccgcgccgtcctcatcagtaggcgcgggaccttcctgctgaaactcttcgatcctgcctgcggtccgttcgttgtaacctcccagctctagctcgttgaggtaagcccagtcctggatgtaaaggtacctctgaatcgaggacaagacgagtacggtcccgaggaggaagagcccgaggatgaccaagaaagagatgaggatgttccttcggacgttggattggcccttgttcaccgtcgagatggaaaacgaggttgatttcgatcgacctcgaccgcccctggacacggtaaacgtggaagaaccgggcacgggcgtggaaaactttttggtcgagctcctgccctttggcgggtaagtgccgtctatgccgtcagcccgactggtagtcccgtccgcttcctcatcgtcatcctcgttctcgccgacgcgacccctccagtcctcagggtatcggtccgaaatggtatacctccgtcccttggaagattcgcccgtggtccgtcgagcatgctgatcccactgccaggtatgcctcgattcgtcccggtcgtcttcatacaaagaagatcgtcgggaacgagatccagtccacctggcggaccctgtgccgcctccgctgcgaaatcctggagaggggagcgacggggtgacaaagttgatgctgcccttccgactcggcccgttcgaattccgactgtgatgtcgggtgaggggagtacccgcctgagaaggagttcggcgggaggaagtggttcccccgatgatggatgatggggcatgacccttttgattgacgctcgagcgcctcgacctgggctcctggaaatgtaattgaatgctcgtcctcctggatgaaggtcgagagccggcgtatgagacgttttcgctgtactcgccatcactgtcatagtctggtgtgatgggtcgtttgtgatgcttgcgatgaggatactgttgagacgaggatgaggggaacatgtcgccaggggaaaagggagatccaagaggttcaggttcctcggtatacactgatgactgtcccaaagaggccgggttttcggtctgatgttgctgttgctgaggatggagggactggtggtgcgacggttgaatcgacccggatggtgattgcaccccagacgtcgagttcagggatgaacctcgtcttggtggtcgccgagtatttctgagagacccttgagcgatggtaccgttggcatcgatggagagactaggtctagcagaaccggttccaccagcaacgtcctgggcaaacgagatgatggctgacgaattggagccttttcgctgatgacccgttccgacacctcgactgatggtgcctcccgtcgtcgcgtccggtctcgtcgagatggaagacgaccttcgattccggagttgtgagatgatcggctcggtcggagcggggctcgtcgagttgggcgacgacatgtcctcgatgaatttgccaagctgaccactaatcaggtggatgttggtctcgtcgacggtatgcgaagaggtggaagtggagccctgactcccgaggtcgtcgcgatcagagtcgtcttcgtcttcgaacgcggtgtcgacgtcgtcgtgatactgcgttgcctggagagagtaccgctgattgcgtactccttttcgatataaagtcgttcctgctgcgtcgatatcgacctgaccattcccatcatcatcaacatcaacatcatcttccctcttgatgatcattctcgcaaacatgacttggtttctacgcgagaggggaaagagagtagtgtgtgtttaccctgaggcctctccctctactgccgttttggatccgcgtcaaagagatcttggtccaggtcgaggctgcgggatcgaaagcggtaggaactcccaaagggtctgcgtaggtccaagtttctaaactcaatacgtgatgcaccacagtgtcatatccgaaacgtcccaatgtgagggagagaaaggaattcctttcgttgctcaatcccgtcgataccaaaagataaaagtccgtcgcaacgaacactcgctatatgattaaatctcatcattgcccccatccttctccccgatgaatcccctttccctctctctctcaatctgcctcgctccgtcacccgccctcgcggtacggaatctctgccaatcgtcatgatacagaatctcctcgcgcgctctctctctctctctttctctccctgttttgcgccctccggcctgagttcatttcctgcggcctgcggaccttgtgtgccaaacctggctcttgattcgctaaaagcaccacaacgccggcagaacaagaaccgagcagcagcacgagcaaaaccaggcgcaaacagcagcgaggtgcacgaggaaagcgagactcgtgtggggaagcaccgcatttccccactatatccagcgacacgttcgaaagactcggcgcgatttcgggatcacccgaaaaaagacgcgagctcccgacggccgcaggcggtgaggctatacttgaaccttctttccgtttgccccttttggatccgacctgcatcccgcccacgacctgcctgtcgacagggcgatgaggcgcgatcaacgtggcgtttttcatcaatttatccccgcgtggggctttgcaggcgacacccaccgcagagggaacagaaatccagggcaggaggacttgaagaacgttctacggcgaaaggccatcgccacaatctcagaaagagatcacatcgtctttgcgtcttgggtctcgaagaagcgggttcttctctcctcgaactgttcgatagtacgtgccaaaacttcaacgaatgatgaccttcgaaacgctcgagttgcgagtcggtgagcagaccggccaggccacacatttggagcgacatcccgaacactctggtgccctgaactgtcgtccaaccgtgttctcatttatgcgctcgtttacggtacgcaactctgtccgattacccgggactgtgacgcgtttggactgcgagtcgtgacccaagcggcgcgtcggccagggcgtcccagagtgtttctcggacccatgcggtgtcaaattcaaggggctggagccaagaacatcaagaaaatgtgccagcctagtcgaaagtgtaccagacaggttgcttgagtgcctgccatgctcacggtcgatgctgggcgaatgtcgagttcgctcttggcttcaatacccttttgtcacatgacatgcataaaaggacgatggcaagtacgacgagcccgtatggtttggaggctatgtgcaagcaccacggctacatcgacgtaccgctcgaagcagacgcgtttagacaaacctcgaaaccgatcaaactgatagggtgcgggcgcgggacataacgctcccacggaaatccgcgctagtgatccgagggggttagacaggtgtctctacaggctataggccatctgcgcaggaagcagagacggaacggatctagatacaagctgtaacaaatcgaccggacatctatgaaggaatctcagatggacattctcctattgcgtttgaacgggattgtcagcccgaggcgtcagaaaggacgagttccgcgtgaccagacgtaccgcagtcgagtcccacgcttgaccgcctgacttttggcctggatatcatcgaccaaacctgtgggcaacttcccttcctccttccactgtttcaaaacaccccgcgccgcatcaagtcccacagcgtagacctcgttgaatttgctgaaacctccgagcgtttcaaactgctggacaggcatggcgtagtacaggcatcccggagtctttttcgcttcgtttagtgtaccagcagatgcaacgctgtgcaaaattcgagaatcaacatcagtcacacgtgccgagcaatcttcgacggatcatcataggactgactaggcgagacggccgttgacctccgtcatgctcaacacggatcgcttcgagaacggattaagactgcgaaacaggaagcgacgtcgatcagctcccgtaaatatctcccgcgtccaggaatataacgacgcagaactgcgcaccggctgaacaacacagcccaaccagaaacggaatctccatagtgtcgcggagaagtgtcttcgatagatcccacatccacggctataatatcgacggcgcccaattccgagatcatctcggccaccggcaagttggaaaagtaacccccgtcgaccagcagactaccccggtcagacagtggcggcaaaagacccgccaatgtcatgctcgctcggacataccgccaggcgtatccggtacgatggatctcgagtcgagagtgggtgatattggtggaattacagaagtaagggatccacatatctgagtgtacagactccatgcatgaggtcttgtaatggggttgtggctcgaaacgtaatgcttaccttcgatatgaagatcgtaaaaggctttgtctgcacgataaattgatgggctgctctcagcgtcgagctaaggaagaaagacggcgagactgagagagcttacagataccccggtctgcaatagcgcatcaaagggtctttagcaaccatgtcgaggggtcaattggcgaagatgactcactgaattcgtgtccagttgtgtaagacgcaaacggataggtcaaatcactaagaatccgccacagcgaggacatcctgcccgcaaactacaaaggaccgccgtcgtcgtcagcgcggtctgcaaattcgttaggccgatctaaccgtttgacattcacctgcttcgttcgccccgtcgtcgacaacaaatcgccctcgcgagcgtacagcccgccgatgaagcttccaatcgagcaacctccgatagcatcgacgggaatctgcatttcctccagagcttcgagcatcccgagatgcgatattcctctgccaccaccgcccccgagcaccaacccgatactcttcccgcaaagcctcctggccagcctggcaaagtcattgagatgtgggggtcgccgaggtctctctgatggccggaaacgatacttcttgattcgggtctcgactttttctcgtagatgcttgaacgccacaaccgcagctggatcgtgaatgatgggtacccctttgttcggcacgataaccccaggcagttcaacatgatgatgagcggtgataaaaggccgttcctatccaaagggcatgtcaggatggatggttactgcgtgatacgtagacatgctcaccttgagccagcgacgagtagagccaggcgcaacatagcgttcaggatgcaagagtaccatctcctttcgtgccgtcgttcccgaagcgaggaggaacttctcgtattcaccgagtgcaggttcgtctcccatgccgactaggagaatgaaatccgcctggaaaacgcattcgcatcagtatgagtagacccgctaatatgttatcatggactcgcctgcttgatagatgtcatggtccaagaactagtgacaggagtgtcaactacgtacagcaccatgcggtacttcctctccttttctccaagccacccgctgactttgagctttcccatcttggtgaaagcatgcttgcctaactgccggattgctgtggcctggtcgaggtatgccgtcggagccccaatgtcctccagtgcgacacggagacgctcggcaaaggcggctaccggtacgtttcgcgtcgttggcattacgcagatggtcttcaggttgagattggtcgaggtcgcattcgctttagattcggccgcgcggttctgagtaggctcggcggccttccgcacacgcgaagcgattagtcgaaggaagcgaatcgtagtagcgggatgctgcgtggaaatggcattaaacagtgccatcggcatacggactagctccgactcgcggatagcatggactgtatgcgatcgcttgcttccagtgatagcttcaagctccccgataatggagttttgaccgtgctcagccatgatcttgacctccccacgggatgattcattcagtgtacgcaatcgcccatctgatggaacggcagatcggctggagagctcggttcaacaccaggacgacgagacttactgatcacaaaatagaacgaatcgctcttatcgccttcgcggtacagcacttgccctgcactggcttgggtccagtcaagagctagatccaaatgatgcactagaaagggtcaccgatacatcgggtcaatctactgcatcgaactggttccgaatcttgtgctcaccgagcggcgagaggaccgatgtcaatcgcttcgccagagtcagcaatacgatgggccttcgctcgagaagtctctcgaagcttgcatgaggaagcaagccgacgtaacagtccgttttggctaggatcgtagtatacgattctgagctgctcaaagcagcaagatagcctgcaataccaccaggctgaacaaagacataggtcagtcttcggcaagtctgttaaatcacgggagcccgcaccttaatctcaaacagcaactcttgatcaccttgcggggcagtttccatccggaagtcgacatcggcgttcgctgtcgatgtcatcgtcacgtctaggaaaccatcaatgacgaagaagctgaaaacatcgctcattcagcttggctaaggggaggaatatgctgtctgacagagagaacttacagaccagcgttggcctcgccctctttgactaaaacgctacctgccttgaagtaaaggatctgcacgtcgttctcgagatcttccacgccaccggtatggctctctgcagcggttccagtgtgactggcatcttcctccccttgtagaccgcccaaagtggacgcttgacttcgggtgatgtccagcatggacagcccgccgaacggcgaacgaatcgaggctgatcctggccctcggcgacccttttgaccgaaaaccaacggcgacgtgggagtcgacatggctatcgagtctgcaccggagggtaaggccgattcggtgttgggagcctggatcagtccgatagactcggcgatcgaggtcatgacagcctcttttaggtcaaactcctcgttgagactttcgatggtcgtgccgtgcttggcgatcttgcggcgcaccatattgttggacgaagttccccgaaggattccgggtgtcttggcctgccaagtgtcgttacgactgaaaccgggagttcgagattgagggcgataataggcctcgtcgtcgtctctcgtcgtggctgtcatgctcaaaaggtctccagctccgacttgctttctgccattatcgcgtttctgataggtttcttgcctgttggcatacggtctcgcttgctgcaccggactcatcgtgagcttgccaccgacaggagcttttggggtcgtagctggcaatgatggcgccttgctattgcccgatccatccggattgaaggtgaaataatccttgccaaggaccgtctgcgctctactagcaggtgtcaccgcgggattagtaaccccgtcggttgagggctttcgagaaggtttcggcgaagtgcgaagttccggttggaaacgttcccttaggttacgcattcctccttgctcgtaaaaggccgggggtagcggataggataccaacgtgttcaggcgatcttccgcttgcagaatttccctcgtcaggccgaggtatcgatgagctatgagcagcccattcatcagcgttcgactccggcatgagcacatgagaagccacgacgtacctgtcatgaaggtcacccgagcgaatcgagttagaatcaccgagacgatctgccccgtcgccttcgggaacttgtggcgaagccgggtgaacgcttcgaaaggaatcaccgccagagtcgtgtcgaccgtggctcttgcgatgaccgcaggtcgatccccagttgcggtggtattcctctgacggtcttgcttcgacttggtcgtcccgttgaaccgtgatgtagcttccgattggatggaggtcacagccgacaatgggtatcgaaggtgttgcctgttatcggctgtcgatccatcgattggttcttgggcaggggagtctgtcagattgtcgtaacgatgaccgggtccctctgtatgatcagactctgatcgattcgacgacaagtccaatcggctgatactgccttccgccctgacgtacggtgaccgactgtaatcggtccgcttgacgtcttcatacgactctggtgcagatattccacctagaccatcgtccgaacgacctccagtgcttgtaggagccgaatcctgaggatgctcgagctcctcatccggctctccctcccagctgagtttgacgtcctcggtgaagaggcgcaagattgtaaatagggacgagacggttccccccgtggctacttcgttgagcagctgatacccgttgtacgggctctcagggcttgggctaccgctcccagccgaatgggcaaagacctgcacattcccgtcgaccacgcagacgaacccttccttgtcatcggcgtcgagcgagatcgtctctcccgcgatcaaacgtttggtttgcaggtgtctagacagctcgtgaaagacgggcttttccaggaatccaaagattcggatcgcagccaggaactcatctaagtagttgtggaaagcagtggatcgaccaaaatcggacggaatggtgaggtccgggttaagcagatgcgaatccggcggcgccaggctggaggaatgagctatgattgatcagctttcacaccttcgagggcaaacgaatagacgtggacgtacggaggttctttcaggtcgctatatttgttgagtattctgtacctgatccataatgctactcctgcgccgagcaggaatgtcaaggcgacgagcttggtgaaatcgagctgcagcgtcagactgtagccgagaatgcggacgacgtagctacaggcccagatatcaagtaggattcagtaatcttgtccgggagccgcggcaaatttcactcacgtagggatcgttatggtcacgaatgccacaatgacccgcacagctctcaagatatagagaaaggcatggataatggctgcagccaaggccacaatagggttcccaggtttcggcgtagcgtccatgataggctgagcagtggatgttcagaagagctatatcgacagacaactagacgtcaattaccataccgatcggtttgattcaatttctctctgatcagatagtttaggttctataataggtcgttacgagcatatcatcatgtcaatcaccaaattgaccgggaattggatcacaaagttcggtcttcgcccgggaaaattcaggttccgcaacttccgatctgacgaatatctcaacgaagatgatgaacccgtcgatgaggtttagatcttatctacacttccacctggtccgcaatcgcatagattactctggattaccacggaaaaggagcctggtcattgccctctgcgtccatcgaatcaagacgaccgcaatgaaactcgctacatcaggatgcgcaacccgtaagtcggatcatctcgatctcattctcgatcgatcgctaaggggacctgtattttgtctaggtctgcgacaagctgtccgacggtctgagctcggtcaagtcagatgtgcatcgtatgcgtcgaatcccaatgccatctaccctcttccgccaccagctcgaccccctcctgctccaggtccatcgtcacccgtcaggcagccccgacaggatacttccaaaccaccggctcacaccgtgatcgtatcgaccatgcccaagccccgactagactatcgaaagatcgccgagactcagaaagcagtcaccttgaatcatgtgatacggaattcgccatgccccaccgacaccgtctttcatattacacggctccacgaaacgtccaattcgttgcaccgcaagctcgattcggtgcgcgccaagcagcgagacgtcgggaacctgatcaaggcaggaggaggggacgaggcgactcgtcaggcaaagaagctgaagctcaaggtcgtcgaatatgagaggatcctagaggagactgacagggagttgctggagctgggctcgatgctgcccaatgagacgcacccggccacacccgtcggaaaggagaaagaagccatcgagctcgagaggtttggtcccgagcctatcccggccgacaaacgcagagaccacctcgacgttgcagccaagtggggttgggtcgatcctgtcgcatcggcgacggctaccgggacatcctggccgtatctcaaaggacatctagcattgcttgagcaggctataatacagtatactctgagcgtcgctgtaaagaaggggtggacgccagtggcgacacctgatgtcgtcaaggaagacgtcatggcgcgatgcggattccagccgagggacggagcaggccagacatattacctatcaacaacacctcccaactcggatcctgatgcgcctccacctgcgcaacctcaggccaatttggtcctggctgccacggcagaaattccactagcggctctatcagccaacaagatcatcccgcaccagtctctgcctctcaaatacgctggcgtgggcaaggctttccgggctgaagccggagcgagaggagccgatacaagaggtctctaccgactccatcagttccagaagatcgagctctttgcagtgaccgagggagagaacagcgtcagtgaggcgatgatggaggagatgcgagggatccaaaaggaaatctacaacagcttgggattaagcgtccggtaagctagaagcaggagtctgccccgtttgctacaaaaggactcacctcgcctgcgtcacagtgtactggatatgccgacagaggagttgggtgctcctgcttatcgcaagtacgatatggaggcttggatgcctggccgagatgggtggggcgaggtaagtggacgtggacccccaccgatttatgcagcttactcaattagcaatcccacggcagatctcctcgacctcgaattgcaccgactttcaagctcgtaggttgcatattcgacatcgaccacgctcggacaataccgataccacgatccctttcgcacacacgctcaacggcacttgcgcggccattccacgtctgctcgtcgcgctactcgaaaacggagctgtcttgagcgagaaaggggaagtcacaggtctccgtcttcccgcggtccttgagcgattctggatcggtcagaacagtattggcggacaggctgaaattcactgggtttgatgcgattaagcttgcatatactttgaattctgaaccatgatacaatacgtgtagggcatagagtgcatctaaacatgtaacgccaccaactagcctaatgagaaatgcggaagagcaattgaaacatggatatcaagcgcgaatgcttcgtctattctgagtattcctagccttgtagccgcttcgtctccgttcatagattgctctggaggagacctcttcgtcaatacgaatcgagtccagggaatctgattcgtcgcggcttacccttcatcctggttcctgtcgtcgccagcccctatcgcctgtttcgtaggagaccgctgacccgtcactctcggcacatttgacgcattcgtggaatcccgccgcctcccccatcccaacttggcctatagggaatcaagaagtaaatgacggcccatctggttcaggcagaacatgtcatcacttacgcgacgtgcactggccgtcgagctcgctcggttacgcatcggtccagtggacttggtgtttttcctggtcagagacttcctgggcgaacgacgagagggcgatatctcgggaacgttgccggtgtcgagtagtacaggtcttgccggagattcttttaccgcctgcgtcatggcaaacgaaaacaatccagatggagtggctggggtcgtcgagccggaaagcgaagctacagtgccactcgtatcggtacgctgaaacttcgtcggtagtgcggcagggcgggaccgagggactgccgcaaaactcgctgccatagccttgtcaaacgcatctagagggacctccgcgcgacgcgcgatctgcttgcctggagaggcttccgctaatgacgtgttcacgtatctcgagatctggatgagtcgagctacatcctggagagacgtgggcgggttgaattcttctgtcgtaaaacattcacaagtcagccaaaatattgcctggatctcgatctaccgctcgcaaacccactgtcaatggccgctctgcttttgtcggtgtctgtccatgtgtttttggatttctctatctctaactctgcatcccgctgccagtcaacccatctgtccattgtgtcgcgagatgatcctggagtgtatttcgaaactagtgagtccatcgtttcccgcttctcccactgtttttggcgacagtctccatgcctgtctatcgctattttcgatggcacttgctccacagcaaggtaattctgagtggcggccgaatggtccagcattgcgctgatagctgacagtacgttggtcgactttacactgccttgatcgctggtcgagggagagattgtggcagacacgcgtgagctttgcgtttggagacgcgatgtcctgggcggaagaggcttggtcgtgccctcagccgatgtgtatgctaaggagcaacttcagcttcttgttcacgactcttcgaattttcatagacttacagtcatcgccgagaccctctaaaaggaccgaatcggcaacccggtcagcatccgaccgaggcttgtcttgccaactccggtcgccaggattttccgaacggcgcagcatttcctcgctcttacgagccagaggagatgcagactgcgacgatagatcgatttcgctgtgatcgctgatcatagatatgggtctcggacggaagagcgagaaggactggttcttgcttgtagtcgagaaaagcgagtcattgccggtagagacggcatcctgcggcgagtgatcgtagagtgaatccaacctgcttgttgaacatttatagtccaagatagtgtcatacgacgctttggttatcttttcttctcttgtacgaatcttcgccgctactttgccttgtgaaggggaaggctgactactggagggagacccagcgatggaatatagacagttggtcttgaacatcctgtcggaatcgactccaggccgtccaatgcgccgcatagcggaatgagcgctatcgatggaactgtttttgcgtctgtgaccaatagataccgtatgctgtagtgccgagtcgattgagtcgattgaacccctcgtatgagtcacggaagatctgagactgtccgtccagcttttatgaacagagtgaagcttcgtagacttgggctttgttgtttgcgacgccgccgaaaattctcgctcgaagacgttgatgaaattgccagatatcccggtgttgacaactttccctatactgctcatactagcgaatgaaaacagcgaatcgtctggaaggtgctgggaatgtctgggaacgaaaggcatgccgctgctagggaagtttctatggccttctcctgtcactgcaggggctggtcgcccgaacttgaaatccctattgagggaactcctcttgcttatttttgggtgggtccgctcggcatctgtcggttcaacttcgacgaacttgtcagtgtcttctataatcaggccaagtcgatctaattccgctaaaaagctttgccgacaaccattctcgttgagctgggcatattccccagtgaagtcgaatgactccctaggagcttcatcatcggcgggagtcaatgttcccaaggtggaaatggtcgagcccttcgtcgcgattctggtaaaatcggtctgaacgggtggcaaccccaagcgtttcaagttggtgaaactggtggcagaggctcctttcggcgtcggttccgtcacaaatgtgtgtggtaccccttcactcgcttcgtcggcatcagagtcgtcgtctttgaccatctccttttcattcaaatcaatccgtgaaggcatccccacagtctcttcatcgccgcgtaaataccgagatttcgctgaggcattgtcgtcaggcgtgtaccgcctgttgaggttattgtgtagagcgaggcgcaacggactgattttgataggactcgctttcggcctgatcgtgcctgcagattttttgacacctatcatctgactagagttgcggctgactggggtcggactttccgtttcgaggtattgagattccgacggcgagatcatggcagcgcctctcgtcggcgtcaccgtcagcatgctgttaggtgtatgcgacgcgaaatttgccacaagatggtgcaagtcgtcggtcacggtggacatcttggctagatcggtggctggagggaaatactaatgaaatcagggctatctcggcgatcggtgtgacgggtactaacctagctccgcccgaacccgctgagggagcaccgtcccgtgagagggttctgtaattcgctctggcaccgataaaccgtccgaaggtcttcgcttttgagagaaatccttatccttccggctaacgtcgccttggggcgagctaaaaacgccttgcacactggacctcttaggaaggggtccgcctgacttgcgtttctccttggtctccccctggaaaaaagggatgcgcgagcgaaggtagtccagatcattttccaccacatcaagggaatcatcctccgcagacgatcttcgattatctatctgagtgtcgacttgactctcccttgaatattggctgagcagcgaatacgcaaatgccgcgctagatggaggattgtcatcggctgatcccgatgaagagcgatcggcctcgtgcgattggtggacaccgtatccaaaatgcgaaatgtagctttcattacccaacacgtctgcgagtcctgaagtgtgcgtttgcgcaaacgagaattccggtagtcgtggagatactgcgtcgatcggagatatagatcgtttctttagcacttcgggtgggtcgtcctggtcgatcgtgtaagctgggtccgtgaattgccccatggtcgttctccgagtgttagcgaagctggatttacgatcctgagagcgaatgctggtggcagagtttacagatatgcaatctgaagctgaatcgcgcgcgtttggcttcggtcgaagtgtcagctgggaggccgcattcttgaggctgaagcggtctgttcgagctgagcggatcagtggacgggcacagttgaggacacagtctcgctatactgtactgacctttgctatcccgcttctccttcctatcctttccaggtttgcctgcgaacatcttcccgagaagggcggcgggtgccatgcttctctttttcctgatcgctcgcttgccgccaccctgagatccatcttcttcccaaggggcaggtagcccatcagatacagaagatacggaggctagggtccaatctgatatggtactacgatccccgatactaggttcgacgtaggtaaaactgtcgttggtgccatgaccggcctgttgacgcgcgttcgcttggatgtccgcgagactggctttgtgtgacttgaaacgcgagagattcaagttggatttcatcttggcgagactggacatcggtggatgaggcttctcttccggggccaacatctcttcaatcctctcgagatcggccgattggctcgtctggtgtccattgaggtaccaagccgacttcatcttggttaggaggggcgaggcggacgattttttcctcgccctgtgttccaagaacggctcgggcgtcatgcccctcttgaaggctgatggggggagacaatgaccttgaacagcggctctcagatcgcgatggtttccctccgtctttttgtcgtgcaaggggttcgaatccaattggaacgccggcatcagaccccgttgagcgtcgagttcgatcgactcgcggacgaccgggaatgcgtcccggatggtcccgacgatctcgacgtttgggggtagcggctcaggggtctctgtgggtttcctctgtcggggggattgccatttgtctccaaaggtttgactgctcgaccagccgcccttggctcgtctgaccgtggcagtctccttgtcgagactgaggtcagcggcggtcgtcgacgttttgattgtaccaaatgatctgacactaggtggtcttttaccgaagacgccggccaagcttttcctggctttggaatcttggtcgttcccatatcggtagtagacttctcttccggtctgctgtgagatctgggaggtctgggcagagaaagcctcacgggggcctgaagtaccagcaccgtccgatcgagggattttgacactgttgatgtccgcttcacgactttgagccttgactccgaaagtgttcgtcgttcgaacgccagctttgtcactgacaacctctcgatcttgagtgctgtacaaagccaatttggactcgctgctgactgatcctcgcctgtccttgtttctgtcgttgcggtagttcccagcggcggaagcactcctgatcgttggatcccccttcaatggttcggatccgtgcggacagttagtgctaacagactgcaagacgttcctagatctatccttcgatctgaccgtagtagatccttcttctttgatattcgacatcccgttctggtcgaagaggacttcggaaaggatccccttttcccggttcttgtctcgctcggcggatagtctcggaatcctgctcattggcgccgtggtaggaggatcggagacgtcatacgcatcctcgaaacgggacacccggaaattcgattccggtatccgctgttgtatacgagactcggggcgctcgcaatcgagcgcatcctcgaatctggatatcctgctgtccgaatcttgaggctgcaagcgtgaaactggacgggtctgcgagccgttactgattgtgctcgctcggcggtccgagctttgcaaagggaccggaatccccgaaccgtatccggccgcccggaaggctttatgctgaccttcaccggtggtactggaggccggggccatatagacaccataagggttatccttgcgtgaaggcaaaggagcgggacctttcgtcgcgtattgttgccacacttcgagggaaagcccgggtttgttctgcaagcttcctcggcggctggacttgaccgcagagcgggaagaagtcttgctcgatgtgctcgtcttgttgttgctaaagttgttcggttgctgagtcggtcgagggaggttgaaatcaagccttggccctttcagcgcagtgaaagtaggcataggaggcactggaacttgcgatggctgccgagcgtgacgacgaattgaggtttgagagggggcatcattgaacctcgattcgttccggttatgcgcaatcattgtgggatatatcggcttgtgatcgatagtgtgacgtatcatatcagcgcagggttgatcggacggaacgacgaaactctcgcctacccggactcagacggaatctgtaagtattaggagaacagaaaggggtgctcgacgttggcaggacgtaaagagagcgatagtagtaatcttttgtggtcgactaatggaatgttggagcttgtgctgttgaaggggtcgtagtgagagggcgtaaggtcgttgtcgtatttcgtgaaagtcgtaaggatcgatgtccgatcttgaaatcctagcagatctgacctcgttcctttcccaagaggctcccgttcgtcgtagtcaagatggctagcctgagtaccgatttcagtcaaaggtgtacatgagattggaagctgtatgaagtcgaagttgaatgaaggaagcggtgacgacgaacgacgcgtttgttttgacccgagctgacgagagcgagaccaaacacgtcggaccgagattgcttttttgtttacctcctcgaatctcgatcactgctttcccgctatgcgtccatgtggatgatgctgctgatcatcaaaacaaatgcaccccgccgtctgatcatcatgagtggaaagtcactcaacacggagtctggtcatttcagcagtccgacagaccgaacgcacggggcagctatcgctgcacagccaattgtctcacgttgagacacttcggacacgacaaaatagtcttctccgatctccgatcagcacagtacagacaggttgcacacctggcgtgcaatatcgcattgatgagtcgcgtaaaacaaccgcggcgcgatgaaacgatcacggagaatggcttcttttcccagctgaaacgagacgcgtccttgtgtgattacgcggttcggtcacgatgtgatccggccgtgttcccgtcaccgctgatgatggtcaatttcgatgctgatcactcggagtcgcaaggtgaagcagcatagtccgcatgtagagtctgttaaagccaatggatctcaccagtatatctcaggccgatcctgggcgaggtgggcgtgatgagatgacggacgaccacccaaacgatcaggctgatcatcccgcggctggcttcctcaaacggaaggtctcccgcgcgtgaagatcatcacaaatcgaccatcacacctcccgtcccctttgaccactttgatgcacgccaagatggaagcacaggggagtgttagcggagaaatcttgtttgaacagatgcctcgctggatcactattgggctatcgcctcatctgcctcacgaagcgcgaggcatggctttcgatcgagacgatgtaggaccgcgatcgagacatggccaattccgattaagtcgcagcaacaaaaacgaagagtcgtcaggtgatatcacaattgacgtagtggtctagtcttgcccctgttgcaaaaactcatacagtactgatattgttgccagagatttctggagaactacctgcatggacgggtcgagattgggcggtccagccaggattcttctccttacagagcgacatcaaccaggccttcccagaagggtcaacgctggggcatgggtcaaaatcggtcaggccgtacactaagagaccccgattggctagaagaagcaaagacgacggggaagggaacgcgatacagatcgattcggagagatatctcgtgagtggtcgcaaatgccgcaaagacgaggctaaaaaccacgaggaagctttgttgggcttcgacaaggtccgtagcgggatcaggttctgaaaacaggttgactgtagatgcagtcccttgttgagagaagactcttctgctcatttcgttcctgttgtgcgtgacagcgaggattcagcggcttcgaggaacgcagttctgtaaactgtaggtctttgtgatcgtcccaaattattgcactctcctggatgcatgatgtcaacttgatatctggattgacgtcatgaaacgagcaatcgacgacaatttcttatcactttttcccacccttcttccctcccttgcccttcttcttgcccacgctgaacttctcgggaacagctgaacctttggcgatctcgctcttgctcaaggtcaagaccccgcccttgaacctgcctactcccatgctcaaccccctctcgtccgtcttggatctcctctccttttccttttcctgcctcttcttggcggctagcgtcaaccccttgtccttgccgccgatatcgcccagacctccagaccctttgacccaagagccggacgcttgcgcttctgctcgggccttctcggcacgacgttcttgagctttgaggatgttgcttcggatcttggtcggttgtgacttatacgccgttgaatgcaattcactcgatccttcgcccagtccggcgatcgaggcgagctataagtgaggaccaacaaatgcacggtttaattggagccctttcgacagcgacatgggttgcccatgcttacctctagcaatcgactgctcatctgattacgcttctcggacggcttggctgccgtactcgcacttggcaacagactggtcatcaacagcccatgaagctccttgtccagcgtagcgttcgatctgaggtgtcaggagatgctatatcagatacggcagatagcatagtccagggtctcaaggccaagctcacctgtcttcttcttcttcagcttgatcctcggcggatcccttgtttcgacgacctgggacgtccacgtcgggcttctgaatgttcatcatcttggacgatttagaagactatgggcacggaatatctcggtgatgagttttcacgagctcaacgaagctggatggacggtatgcgggactgaccatgaatcgcttaaagtctgcctttgacgtcgaatccagcgtacttctcccggcatcccctccgaagacgaccgtctgtacttcttctgctacatcgtcatctccttcgtcctcttgtacgctctcctcgtcatagtcgtcttgcgcggagataccgtcgtccccatcgtcctcgtcaaagccctccccttcctcgagctcagagtcctcctcagagtcctcactgaagatgccatcgagaccgtccagaacattcctcgattgcttcaaggcgttgtccttcttgctgtgggcctgttgggctttcgatcgctctgctatcttgctgggaccagcctttggggtgtcgaggctagcgaacatggctcgcccatgagcctcgagagctgcgagcatggcctgcttgtcgtcttcaacatcggtctcgtcgtcttcgctagacgcttggctcccggaaggctcatccgagtcatcttctgagccaggatctgagagcagcacggatttcggttgcgagacagctggtctcgagcgtttgctcgcactggatttcaaggatcagcgtcggtcccctgacttggaggagtggtaaggactcaccgctcgagtgcctcttgccgcgttcgcttcaacggattgatcgcctgtgtcgccattcttccaattgttcgacgttgtaccaggatgcttacgggccaatctctactatgggttcaacgagattagcctgcggcttgtaagttgaagaaccgacgtgcaagcagctcaagcagcgaggagggacaatttcgcatcacgccgatgcattcggtttgaaatctcggtcaaatacgcgtcgccccaattcggtttacccggacctaatcggtggcttttgtgtgacggatagtcaaggtcgagccgggtgatacaggtcacgtctcactcgcagatgatacacgagggctatcacaaagatcaagctactgcatgatgagcatcgatccgatcgaggatatttcgtgccccaagatttgactcgatgagcgacccagatcgggcaggtgtttcgctctgggcgaaggtaagagcaggaagagcagggggcgaacgatctcaatatcgcattataatcggctaattcaagatagtacacacgaggattcaaggaaagtaccgaaatcgcagccagagaatacggatagtagaacgttcaatccctaccttgtacttcgacatctcctatgcttccgcactgccctttcgaggtatcgtctgaaccggagcggcctcggcttctgtttgagcagcgagccttttgcgacgcctttccagtacctctcgacggaattctttctggatgacccgaaccatgaggtctccagacctacgtctctgttgcacaggtatctcaaagcctggaacactttctcgttgcgagcgctctggatcagccgactcttcctgaccgtccctgatttccggaccggatcgttgcagatcgacaactccaaaaacttgacggagaggcgagggtctgaaaacgaccgttcgtctgagagaaacgttcgccggcagttgtttcgtcggcgtgatgacgctgttccttcggatgatcgcgctcttgaccgacaacgacgggaggagccgattctccgcgatttccggtccctcgaaacggggctcgaagttgttcaaacgaggggtagctggcgtttcgggaatgtgctgcacggcgtaaccgctaatgtcctccggggcgcggtagatggttttgagcgccggtcgacgcctgggtgcattctggaccggttcttccgtctgaggcccggtcatcgctccaccttgaacggcggctgacttgagcctgcgtaatctctgggagagcaacgatttgcagaccgagaacgcattgaggcgggagcgatgctgttcggtgactgcgatgtgtttgtcgatctcgtaggtatcttcgacgggggagggaagcatgtaagttttcttcagaaagtatgcggatgatctggaccgggtggtacggagttcagtaaagtgaatcatcacggtgaactgcccgacgcgcagcttcaacaactcacaattcgagactttccttgtcatcttccggtgagaacggcgattcgggttcggagagcttccgggcccagtcgtggaccgacatgtcgtcttctttgatatcgcgcttgcggaaagcgatagtgaacccatcgacagcgtgggtcttgctgagccatttgttggtagtcatcttgaaaaactggctgtgacttttggccaagatggagcggtcgtagggattcgaaccagcgccgataaataggctgggggcgggtctcttacagggaactgggataggggcggacatggtggtgctggacatgcttgactaagttgaagctggaagatggaatgtcgagcgatgcaagagtagtatgtgacaccgtgataccaaattgaaggcttactgcactgtacaacccagcttacttggcccaccttatatattattctggaccaggacgtgacaagtggtccgatcctctgattgtcagtgagcgcgatgcgcgacccgcgactcgcgactcgcgcctggcccatatcgatgatgtcctgaaactaggacgcgctcgctgactttttcttcgcccgttcgatcccgctgccctagactaagtggtacctcagcgcaggaaggctttcctgactcatttcaacatgcgtctctgtactgtgtcagcgatgctagtcagaaaagcgtacgcatccggaaataggttccatcagaccatatctgacccgtcaggtccccagggttcgaatctcgattacgtaagcgatgatctcggcatcaacttggccgtagcccgagctcatcatgcatgagcctcatgagcgactagcaactagttgattgcttcgcttgctcacgctcatcctcctgctctagctggtgccacactactgcttcattcacattcgatcttgtcttctcacacacgctcgtcgggccgtaccttcttgtcctcactcgaacggagccgacaaccagttctatactgcgatttcaactcgagaagggcaacatggaacccatctcgccccgagaggccttgcagccgtatctcaagcctgataccaccaaaggtaaggcatccgcagcattctgcttagcaccatgacttcttacatccgatcatattcatcgtgttggatcgacatagtgatcgtccggttcaagtcagtaggctcggctccgatcatgaagcagaactactacaagatcacggggtcccatccgttctcggctgtgcatacttttctacggaaggagctcgggtggggtaaaccagggggacctgcgggaacaggcggggaactagtgagtagcgtcgatcatctgattgtaagggagatgttcatgaccacctcgtctggcttgctagttcctatatatcaactcggcgtttgccccagctccggacgataccgtgtcaaatcttttcaaagtgaatatcgtggtaattacttctgtatcttggagctgattagctcaacatctcgtctcgcccagagcttccagaccgacggtcagctcatagtcaactacaggtgagctccttgtcttcgttatgatcctgctcgtgggctgatcgactcgcattccagtacaacaccggcctggggttgagaagcaagaacacccgatccataaggatatttacgatctataatgaacctggataatataaacctggataatgtgaacctggatatcagatgggaacgacctgctcgatcatttgacgttgtaactaaaatcacacctcgaccgagtcgaccatcgcatcggattagatggacaccgagcacaccagctgaggccacaatatagaagccgatgagcttgcggctatcgtaatggtatagactagaacgacgtctgcaatcgcaccctcaccaagactcgagcctgatgtcggcctgtcgcgacggatgtgaatcaactgtacgcatgagcacctacgaatgatagcatcgcaagaccagaagctgccctagccatcaaacacatccatcgaatatagctgtactgattgttgtaacgttgtagcctgtacagtcagaagacgcggacatcgtagtccttgtatcatgtccgttcgcacggttgatctcgcggtgacgaatgagtgatcgacggtgatcaacgagttgctaagtgctagctacattacattgctcgctataagtagtcatgacaaaggtcgaaccagctcgcaaggcataacctgatcggaccaagcgacatccggttcttatagaacactcaaatctccgggaacgtttgtgtgatcgtcacggctatttgtcgaataaagcaagatgggcgcctctcaatctagcgggaaagtgaccaagaacgacaaggcgatcctcgagtgagtgatcaagcctgaatcccatactcgcaaccgatcgacaaggacgaagttgctgacgaggaatttgcctctagcttgaaagtccaacgggacaagctcaagcagtaccagaaacgggtaggtttggcagaatatcttcgtaaacagctttgtttcgaactgaacgacctctcgcgctctctcgtcttcgcgcagttgacagtcaacttggagacggaacagactgcggctaagcaggctctagcttccgggaacaaggtttgtcgtacaatctctctggctggacctgacggggagccggtgagagcgatcgacgctaacgccgcttcctttgtttttgggatttcgcgatcatagtcacgagctctcactgcattgcgacaaaggaagttccaagagagcctacttataaagacggacggccagctacagacgataacagagcttgtaagacttcctgggcgcctctatgtcaattcccatcaccgggaccctgaactcgctctcacgcttcggccttgctcgcccatcgatagctctcgacgatcgaattctcgcaattacagaatcaggtgctcttgtccctacagaacggatcacaagtcctaggcgagcttcagaaggaaatgagcctcgaacgggcagagtcgatcgtggatagggtcggggagggtgtagccgctcaacgggtgagtccgagtcgcttgtcacatctcaccggttcgttggacaagaaggaattccggctgaacgtctcgccgggttcaacaggagattgacgaggcgttgatgagcaagatgtcaccggaagaggaggaagccgtccaagcagaattcgctcagctcgaacgagaagctcgaggcgaggtgagtctacccgcaccgcgccgccttgtccctaccgtcgcttatcgctccgacgactttgcagacggtcgccgatgtcgagcagaggcaaaagatcgaacaacggctcccggctgtaccttctgcgattcctcaggtggatacggacgaggcgtacgaggtggaccgggtcaagcagaatcgacagcgcgaggaggacctgatgaccatcgccatgccgagctgaacggggatcgatggggaacgacggcttgttttcttgtaccgacgggtaatcgggtcgatgttgtacatgggatcggatctgtatctacacttttcgatgcaacgcccggctataatactagagtcgtaagaccagtttccgagattgtctccatgtgaccctgggggtctatcggatggagtttttcggatttggcggtcgagatttctcatatcctcgatttcgatttatccactttgaaccgatttcagtcaagaacgaggtcgcgattatccgggaaggggaacgcgaaacgaaaccgggtacgacctggttggacttttagagactctattgctatcaagctacaaggaccacaccacattcgcttgcaacgactgtgtcaattattgcacggcttcttggaggattcgttttcgcatgcccaccatgtctcacgttctagccagctctgtccgccgagcggtcaccagccgttcattgcacacctcgcggatccttgcgaccacgtccagtagcaccttgcactcccagctgagcccggcggagttgcaaaacgtcgagacggatgtcaacaaagcgggacttcaaaagacgatcaaggggttcggacgaagcaggatcttcagggatgaaaagggaccgacctatgagcatcgattcctgaaaggtccgggaaccgttgctgtgagtcgatcatggatgaatgaacgttatgctaaaaactaccagctgaacatgatcgctacttctaggtcgtcggatgtcctttcaggtaaggagcagctgtaagattgaaacttcgacatcccgctcagtcccaatccccccttggttatagcggcggacagggcaaatccggtgtcgacctcggtccgaacgccttggtcgaacgaggtctcctctcccagctctctgaactcggatggaacgtgcactacgaaggtcctgccgagttcgacgatatcccttacatcaacccccaccagcccggagctgccaagggacgagaggtcttgcccgacccggatatcggggtgatgaagaaacctaggttggtcagcgccgtcaaccagcgggctatggagatcatcagagatcatgcgatggaagggaggctacctctcaccttgggaggagaccatagtctcgttagtcgagtcgagaacgggttgagattcggaaaaaaaataaaagggggttgctgacgtatacggcccggttacggttgtaggctatggcgacggtctcgggcatcaaggccaagtaccccgatgcctgtgtcgtctgggtatgtctcgacctaagcctctggcaccacattcttagctgactccccgtattgcccgacctaggtcgacgctcacgccgacatcaacacccctgctacgagcgacagcggtaacattcacggcatgcccatctctttcctgctcggtctgcctgggaccgacgtggcacccttctcggactggatcaagccatgcttgaagccgtctgatatcgtatacattggacttcgagacctcgatgtcgaggagaagaagatcctgcgtgacttgggtatcaagtgtttcaccatgcacgaagtcgataggttgggagtcggcgaggtcgtcaagaaagctctcaagcacgtcaaccccaagggagagcgaccagttcacttgagctttgatgtcgacgcttgtgatcctagtgttgccggcagtgagtacagcctcggtcatggtcgatcggattatacgactaactcatgatcgtataggtaccggaactcccgttcgcggcggtctgactttcagggaagctcattacatctgtgaagctatcgccgagactggatgcctcgtcgggcttgatatcatggtcagtcatcgaacttcctcgagcatgcgcttgtcatgtctaacgacacgatcaccctcccttttactaaacaggaagtcaacccggccttgggagatgacaagtcggtcaacgagacggtcgcggtcggctgctctctggcccgagcggctttgggggagactttgctctagaggagctttatcggtgggagagacgttgagaatggtttgggaaaggcggtcgacaacacgtacagtttttactgcaaacagcatgactccaagaatacacaatcgcatttaagttcagatggttcgttctggccaaacatctgaccgcttcatggcgagtccggtctccgccggggagtgcgcccttctgagatgtgattgtgcgtatatgatcttgtctagcactctctcgccgataagtgcggctacaaaggctatcggaaccggcgtgctgcctagtctaatggctcgtgcaacgggttatcgcttcctgctcctgggtaccttcgtgaactacctgaaggttcgacatgactgtaggcatgcgaatctaccgccacaaagtccgacattttcaatggccgcagcacgaagccctgtccatccggaacatatcgggtcaacaatcgtccggatacggaaagtgcgattgttgttcatgctcgctcacctctcgtttggcctcttccattcccttgattcccttgccacctttttcacgcatcaactctcgcaccgggatcatggcggcattcctgcacgtctccttcaagtccgaccctgacagcccgtctgtccgtcgtgcgagctcctcaaagtcaaatccaggcgtaagggtggcatgcttgagcataagtcggagaatcttgagtcgttgtgtgtgattaggaagacggatagcgaaacgcttgggcattcgacgcaagatggcaggatcgatactgtcgtttccgtcggacctgttagactcgagaatcgataacttccgccgaaactcgactcactcgttcggtcgattcgttgcaccgagaacgagtaccctcgaatcatctcccgacatcaggccatcccacaagctgcaagagggaattgggtaagaggggtacaatgaacatgtctcccccaaaactcacgtcatgaattcagccttgatcattcccgtcacttcgtgatcaccggtcgcacgcgaacggaacagcgagtcgatttcatcgatgaaaatctgtgacggggtagtgagtccattgtcatcagcaaatagtcaggtcaggctgagggaatcatggaagactgacgatggaaggctgcaacttggttgccaaggagaaaagaccggcgaccaatttgttcgattcacccaaccacttgttcatcctatcagtacacgacggcaatagggcatgagcattcggcaacgcagcaaagcttcgaaagtcaacccggcttacagactcgacagaggcagattgatgaaagtcgctccgctttcctttgccagcgccttggccatcgtggtcttgcctgtaccaggtggtccgtacaacaacacccccttgggcgcggccagaagtccaccttggcttctgaatagttcggggtaagtcagagggtagatgaccgtctcttttagttgaccgatgacatcctccaagcctccgatgctgtcgaatgtcgtactgatactagagggtggcacgatctcgcctgcgatcgcctgttcgtattcatcgagctcgagttccgacaagtcgagatcgccaatcttgagcgagttgagcaattcttggctcttcttggactgcttcttgcggtcggtcttctgtgggtccaagtttgagaggacgtaccggaccgcatagaaaagtgcgatctgcgacgccgcaaagactgtcacgtccacgatcaccttgttcaagtccctgcccatgacgttgtgagctggtcgtttcccctttgtttctcgtcactccgttggtgctggctgggttcctattcgtaatactactgtacacccgtgtgactcaatttagtttcgaggccttgtatactgacaacccaaaatgaaatcgttatcttgtggtatcaaccggttattagctgaattttgttcagcgggtgcgccctcgcctcggcctcgatctgcccgcttcaagtcgcctcgacacggaatttcatcattcaacttgatctctcttacaaccgatctccctttacaccacgcacgtattatcttgtccaatccttctgtcggacagcaaccaagtagcaaagccaggaatttgtctgattataggcatagccctggcgccattggacaccatatcatgtctcacatcgacccgttccatattgaaggtcagttgatgacgacttgattctgcaacatatccgatctgacccttgctccggccgattgtagtctggctgaaggaagcggaaaaatcgtacaagcatgatctggccgcttcatgtaataccctcagcctggctcagctggtcgagcattgtagcgacaagcagctcgcaaagccttgggaggacatcaacatcggcctcgattacggttacatggacggcagccctgtgttgaagaggaccatcgccgatatctacgaaaaggagctacggagagaattctccacagacggcatcatcccatcgatcggggccatcggggccaactatgcatttctttatgctcacgtaaaagcaggtgaccatgtcatctgccagtatccgacttggcagcaactttactcggtcccgaaatcgctgggagccgaggtgactttgtggaagacgtctatgacggatggctggcaactcgacccggaggcgctggaggctaagatcaggcccaacaccagaatgatcatcctgaacaacccgcaaaacccgaccggcgccgttcttgcgcaaaagtcgcttcagctcgtcgtagccatcgccaagaagcacgacctctacatactttgcgatgaagtcttccgctcgcttgtccacggactcgaggcttcggaactcccgccctctatcctttctttcaactatcccaaatcggcggcgatcagctccatgtcaaaagcctattccctcgctggagtcagggtcggatggatcgcctcggacaacccagatatcatcaaggcgtgtctttctgccagagactatacgaccgtctgcgtttccaagatttgcgagggcatcacgacgtacgcactgaatccggcggtcggacccaacgtggttcagtccaacatcgagacggccagggtcaacttggggcatttgcgatcttttattgacaagcacaaagatatttgttcctgggtcgagccgaaagctagcagcacggcctttgtgctgttcaaagataagacaggagagccggtggacgatgccgtgttctgtaagcgtttacaggatgataccgggatcatgctcgtcccaggaggatacgctttcggtcaagattacaaaggtttcatccggatcggctatatcggagaaaccgatggctttttgaagggattgaaggcttgggatgaatggctcgacgcttggaaggccgagcagtagattcattctctaacgaagggctgctcggccatcttggcacaacgaccgcgccgtgaaacacgacacacatatatacgacaattcacgaccgtcactgctagcccgctagggtgtttgtacaacaggatagtaatattcacgaaaccgaggaatcattgactagctttgatgatctccatgccagtgttcgttgcggattctttcgcgtcatcagtgccaaaagaccgtcattgatggccaagcgagtgctggaagggccgccgcgacacgaatgtctgaggtcaggctacttgtttgctccccatgtcgcgatgccatgcatatggcctacaagcggtattcccgcctcagcgcttagcagaatctcgcgaaccatccgaatgtgactcacgcatcgtcttcgtccaagagcttcgcctcgatatccgatctccagtagagcacccatatggtgctcatcagtcccacacccccgcccaatatccacaaaagcacgtcatcagtattgggaaagtagaggaccacggcaaagctagcggagacggtcgtccaaaaaggttggccgaagagcgatgatttccgagcggaaggtgggtgattcacgttggtgattttttgagcatccgttgcctcgtattttttagcgagatcgaattgccatagttgtacgagctttggagagcacccgttcaatcaaccatgcaactatgggtcacctcgtccaccactatcttaccagtgcgccccagatcgttctgactacgtatgcgtaacccgtccagaccaagaccttccctgtttcacctccaaacagtaccaattgatgcctgagcatcgtccaagtgattgcctgggatacgaagagctcggagaccatattcgaaattttgtttccagcgatttggtgaacgaggtagacgatgcagagtgacgcctgatcaagacccgatcagtagctgatgcttcgacccgagacggataggggtgagcttacctgtgtccgcatcgtccaattgaaactggacttgaatgagcaggaagggctagctccgtggaaccaccaggtcaagagggtacctgtcaaagcgtcgaggatatggaggtaccccgtgttcgggtcgtagatgtcgtctccgtgaccttcgggaatcaacgtgagatgagagatataccagatcaatgacatcaaagcggataggttcgagtgcaaagccaagcgcatgtatgaggagcatagcttgttgaccgataagaggaaataaaactacaatattataccgccgtcaagagggtcaattgactctttcacgtctcacatggggcggtgcacttcgcattactcacctcgtccaaaaaacacatcccgcccgcccaaatgctgtgcattagaatcaaatctccagcgccaacttgtccgtcatggcttagttgagaacgaaatagactggtccataggtaggtaatgctccctaggggaagcagtgtgcctgccgcgaggagaacgggtttcaggcgatatgaccaggaatgatgagtcggaccagcgggaacatcgactgtgcgatgaagaggagctacctccttttcgtagtctacgggctacagtaaagaactatcagtattgacttgtctgacattgcatctactgaataggggctcacgagggtgtcacctttcatagagaagtaagttagcaagaaaacgatggcgttgccgagcagcagcggcgccttgggcaagacgggtttcaccagatcgaagaccgccatgtccgcagcgaggagctctttcaaagcggcgaaacgaatgaagcggagactgggagtgtggactccctagcctctggcctattgatgcttgcgagtccggtgaatcacgagtgaactatcgaatttctatctaggccgtctaggagagcgccatcaaatgggggagggtgttcggatgtaaatcttcatccgatattgatcatcggatgtaaatttgattccgaatgactaatcacttgcgcgtcgatcgccgactttgagcaacatctacctgaacaagtcagtcggctcacagaatggaattacaaaagacttgagttcctgctataggactagccccttcatcttcctcggctcataaaatcaggagctggacaatcatcaagacggcagaagctcagcgatatgtcgtcgggcgcaaacactcttataggcaggtatgagcatctggcgaagcgacctcagcacgaaaaagcaaagtaagtcggggctggttcaggttcgccacataccaacaagagtgactgaggcgatgcaacgatccggacagggagctcctcatgcgaactggatcgctggtcaagccaatcatgaagaaacacgactggaaagtgggcacgctcgccgaggttcgtcatgtctccaccatctcaaggattccacccgtgaactgatctcgcgagccggttacagttcgtcccaagtaatcccaaccttctaggtcagtttggtacgggaaatataattcaccttgccacaaactgatgaaccatggattcctctatatcctacaggcatgaaccagaacgctggcttcaagatcctcctccgtcttcgccctcaccaagcccaagacactttttacgaccaggaccagctcgtgctagtcatgctacatgaggtccgtcaaccataatattattcgatagatatcgaaaagacagtgctaattgatcacaaaaatacatagttgacgcacaacgttcacggaccgcatgatgccaagttctacaagctattaggggagcttgaagaggaatggtacgagctcaaacggaagggatactctggtaagcctaatatctggtgctctgtagcggtgcgatcgcttgagccagcagactgaccgtagtgttggctatataggtgaaggtttcctatccgaaggagcaaggttggggggaacccacggggtgccacaacacatcggtcggatcaaggcactcgaagcggcagagaaacgggtggccaagcagcaacttatcggcaaggggggcaagctcggatctgggcccggatcgagagcaggacgaacgatgcgcgaagtcttgctcgaggtaagtcgtagggtatgggatccacccgcaaaggagcgaggtttgtcgttcacgagctgatcattcgatatgctgggttatattcaggccacggagagaaggctgaaagatgacaactcttgtgcgcacgagtctgttgatgtggacgatgaagtgagaaaggcagcagccgaaagtgaaggacaagatgctgccgaggcagaacgagggtgggcagaagctatcgacgtggatgcactcgattcgaatgacgttagtggttcgagcgtcaaggtcgaaccaccggctctggtcgatacggtcccccaacttatgaagccggatatcaaacgtaacgaatcaacaggcaagtcctcctcattaccaccgacatcttcagtcccgaaacctctggcaaaaaagcctcggatcgcgtctccagaaccgagcaaacctgcaaccgacccatatctacggtctgacggttggacatgcgcaacatgtaccctggacaactcgaccgtcgatcagtcctgccaagcgtgtggtcaagcgagacccgctcctccgggattctggacgtgcgacttttgcgcaacatcgattgaggtggacttccgatgttgccgcggttgcggttacgttcggcggatctagacttcggctggtatcagtcattggtgcctcctcttaatactgtatcagacctttttcgcgaatcgctgagctcagatatacatatacccatcacgtccgctcgacaaggttcagccaactcgctcgtcgactggttcatcgaaatcaaaagaggctcgcttttcgtcttgatcaaagtcaaaagtggtgcctctgtgtacatcttcttggcaccgccaggtgcaatctgtattgattcgcattgcgttgtgcatgtcatttcattacggtatacagtattggcctggaggcggggttatgagcattaattcccagcagtcgtccttccgatagccttgatagcaccgccagacagttctggcaatggcttagcgtcctggttaggaggtgcgtctaagaatccagcccggatcaaccaggcgatgtatcgtcccatctcctcgtctccaacgctcgcgcccgtctgttcgcccgcacctgatagcaacgcctgggcgttggtgtcatccagctcggcagccttcgtgctggtcggcagatcgtccaaaacaaagtgcagcaaggggaacaaggcgttgtcctgtacttcgagaacgtgctgctcgagctttcttcgccacaaaaggtattcgcatcggtccacagggtatccgtagaggggcaaggcggacaaaaagtcgttgaacctgatcttaggatgagcagaaacttgagcgatagcgaaggacgactccttgggcggatagatcgcggaaacggaggccagcctggcaacgtgatcaaccgggaccatgttgatggtgttgttgatatctggcatcaagccaagctgaatgcaacccttgacaaggcgccagataaagtcatccgtgttcgtaactgtaggcgatccacggatagtcagcctgaagagcccggtgtcaagcgaggttcgatggctcgtggcttaccagcagtctttgagtcaccaacgatgtaagagggtcggacggtccatccagatagaccgcgcttgccagcctccatgatgagcttttctgcgacccacttggattgaccgtatcctgtggtcaaggtcgtccggcttccttccagatcatccgattcgggcacacctcgtccgccggcttcgacaatcgcgtcggccatcgtgacgtagtgctccgcctcgacagtagcggtcgtcgagacgaaagaaaacgatttcgagtggtgctcggtacagagacgcaaggcggtgatagtggaaaggacgttggcagatctcatcttcgagtacgggtatacccaatgtacctgttgtaatcgcgatgccatcagtcatagcccaaagctccagacagatagggggaactcacgatagctccgttatggagtacgacatcagcttcctcggcacaacgcttccattcggtctcagaaaggccaaagttatcctcggaaaggtcaccaacgacggcctcgactctgccatcagtctgccattgaccgtcccagactcctcgtccccgaccgctttcctctagtcgcttcatcgcctcgtcactcgacttggcgcggacaagacagatgaccttggcaacccgatcgcttcggagagcgagcagatcgtgcaagatgaacgcacccaggaaaccggtagcaccggtcaagaagacggtaaccttcttggatgcgaagtcggcggggagttcggcaaacctttccggcaaactaggtagcaagacctcgatgtccttggcatagtcgacatcgatagcgggaccttggctagccttcggtcggttggaagcatctcctgcgaaaccgaggtcgtcgtttcggagagccccgatactgctagccagacctcctatggtaggctggtcaaagacaagaccgagaggcacgtccacgacaaacgcctttctgagctcgaaagtagccctcgtggccaaaatcgagtgacctcctaggtcaaagaaattctcgtctagctcgatggcagcaggtggcgcaggcaagagcgacatccagacatcgtggatcgtcttttgagtcggggtcagcttttgcgacttggcagaagccgagacgggggcctgcaaagcggtgtccgggaagggcaaagcgggcttgtcgatctttccgttgggattcaaaggcatccttgacaaggggatgaagactgtcatcattgcccgtaatcagcgctcgatccgcaacaacaatttattagagaccggcttaccggtaggcacgctgtacgagggcagctttttcttcaagtgttccttcatgtccttgatcagctttcggtatcttcgcaatcccttggcgatctcggccttgacatctcgtcgaggttcgccttcctcgtcgtcgtggggttcctcgacatcctcctgctcgacctcgctggcgctgatcattgattcgagaccctcgccgctcatggggacaaagtagctgaccaagatcttttcctcgttcttgtctcgcctgacaagcgtgacgttttctcgcacaagagggtgtctagacagatgcgtgtcgatctctcccaattcgattcggaaaccccggattttgatctgatcgtcggctcgtccggtacattccacggtcccgtcgggcaggtatcgaccgagatccccagtcctgtacattcgatctcggatgcccttccagtatttaccctcaggcttgtcggcaatggtatcctgacgttcgacaccctctccgaaccaattcatgacaaacttttccttggtcgcttcggcatccaggtatccttcggccagacctcccgatcgaacgtatatctcgccgatctctcctacggcacaagggacatccctgtctgccctgttgacgaccaagagctggacgtcgatcattccctggccggcgggcataatgtccttctggttggtcatgaaagtaccgtcttggctaacgggagggatggcaaagtacgagacggcacgttgagtctcggtcgtgccgtacatgttgatgatcctgacgtttgaagcgagggattggagacgatggcaatctcgcttggtgaggacgtctccgacgaaaaaggcattcttcaaggtagggatctgacgggtcgcctgagcggacaacaactgacccatggccggggtcaggtgggtcaccgtgacctcgctgtctgccatccactcggcgagtctaccgggagtaccgatatcgtccgcggtgggcacatggagctcggccccgaggaacaagggggtaaagactgttcgagcgcggtcgcatcgagagatcagctatgaccacgggttcgtcccaagtgacagcgaccatcactcactatctcgctggatgggatcgtgcgcgatcccgctcaacatggtaaacttggcctcgggtcccaactggaacctctcgctcatccaggggaaaaagtgagtcaacgaatagtgtcgtcccttgacacccttgggtatccccgtcgatccggacgtgaaggacaaggtagcgtgcgaatccggtccgagcacgatgtccggtttggaagaagctcgagctcggtatgcatcgagaacgtcttcccccgagttggcgttgatgggggaacccgtgagttgcccggacgccgagacggagatggcggggatcaaagctcgtagggagaggttctccttgatatagttggatacggtcgggtggagcgttcccgctgaagagatgatcagcagggctcgaggggaagagacttgcaggtacaccgtctgtcgggagggaggataggccgggtctatttgcaggcggaaccacatcaactcgtctgttccgctcgccagaaatcaacttggactgatgacgacgaaccgataacgctaaacactgctccagccttcaacactcccatcacacagacgaccaattcgacgctcctcgccgcgtaaaccatgacgacctctcccctctctaccccgctctcgaccaacgagtgagccaagatattactcgcctcgtcgatctgcttgtaggtgaacgtcgtcctctcggtcgacgctcccgacgtgttgacggtcgcgacggaagcgtccatcgaggatccggattggacgacacaaggtttctctgggtgggatttggcattgttgtggaaaatgtcggtaatcgcgcccttgaaaccgcaccaatcgaggtcctttttcggatccgggaggacggacacctggtccggggttcgaagggggatggtgctgataggtaccgcggtcgactccccctgagcgacctgttgtagcaagagcgacagcgaagacaagaggtgttccgacctcgccggggtgaagagcaacgagttgtacgatagcgataccgtcgacgtcgagggcgagtaaaagagggtgaggtcggtcgtcaacgaggtcgctgcggccaacccgtgtcttcgatcagactctacggctccgtgaacgctatcccgaccttgctgagcgtccccgccgagctggacatatcggactctgaagagcgggcccgagagctctccgccttcccgttccgagttgagcttgataagtctctcaatagggacggcgtcctctttcgcctctcgcgtcttgccctcgacttccttgaggacatcgtcgaacgtggccttgtcgttggagaaatccagtaacaagagcaatgaagccggatccgagtctgagtgcgtcgactgaatcgtcaaggacgggtccggagtgtatcggtgcaagaggatcgaaaacgccgcgaggacgatctgggactctgagctccctgtcgtcgaggcgatgcgggagacggcatcgctcgtcgacttgtcgagcgagacggtcttgatggcttcgacgagcttgttgggggctgaacgacgagtacgggagctggtatcagtacgggcgggacaccacacggggcgagggttagacgagctagctcactgggtctaggataatccgtgggcaatgccaagctggacgaagctgccagtcgtttagaccatcgcttcaatcgatccttgagttcgagtgcttgtgattgcgacatgttgcgggttagacggcacaagtccgatatgtcgaggtcgaccctgttgcagagttgagcttttcgggtggtgtagaaaagtgacgtgtttctccgacgtcgcttcgattatacaggcggcgttttcccggttttcttggcccacgtattcgctgcttggatacgaagtgctcaggtatatatgtatgtgtttgggatgaagattgagtgtaaaagcaagtttgattcatgactcaaaagagtttaatggattgatattgaactgtgattttcgggcagagcggggatggtcgctacttgactcgaacttgaatgattacggcaacaaaggacaggctattacgtcatttcgtatatcacctcacgttacgtcatgtcgttagaagggtcaacctaccatgcttgccgtacctgctgctggctgctggccgctatgtagctgctatccctgatagaccttgtagcttgtaggcctactactcctactactgtcctgggtaatggcgcacacaacgtcatgatggtgccacatcacgaggcattgcagggttgtacaagtgcgacatcaagggcccggtttaagaccgtggcgtggaacatcacctctactgcttggacagatagtccttgagctgctcgagcgccctatatcggtgcgaaatcttgttcttctcctccttttccatctcggcatagctatcgtatcgcccatcaacagggcccaagttggaataatcagcctcatgtcccgagaaatgtcgatccacccgttcatgcatgcatgcatgcgtgcatgcacgcgtgcccccgactggccggacgttgcgactcacgtcaatccgttcccttcctcgggctcgaaacaacaatcccaaccgaacagcctaggtccccttgggggaacgatccgaccatacgtcttcccctcgaacagcttgacctcgggttccccggactttgaggccgacggagtgctataggcgaacgtacacagtgcgtacgctcggtcgttgtcgaaccccttgaccatcttcgctagacctgcacatgacgggccagtctcagctcgtatggtaagcagatggacgacaccaggctggggccagatcgttgtccgctgtgcaagtaaagtgcgcaccttcgtgtccgagtttgccgaggaaatccttgatataaggtcctggcaggtcattgagcgcctcaaagcataacgccgtatcctcggtgacgaccgcctttcccaactgaagggtcaccgtgaaccgtccacccaagcgaggatcgttcgatgtatcagctcgacgtctttgacgaagcgcacctggagagaggtgtaccgccgattgatcgactatgatcgactgacctctttagcagcggccttgcatttggcgatggctacctcttgagtcgttccctgaatctcggggactgagaccgacacatcatcaaccatcgcacagacggaggagggtgaagaaacggtccgtcgatccgtcagcgagtctagctttgctgtccggccgctgcatgaggctcggtggggaaacactcacggtccacagcctggttcgtcgccgtgatcccgctggtgccggctgccaagatcgcctgaacttctttaagcttgttggcgttacccgtgacgaagactacggtgcattcgtacaacacaataatatcagtcatgacggtctataggaggatgatgaaggacaggtggcggtcgaggctcaccgaaacttttagagccggacatgatcaagttggaggctttccgtatggtgttcgagttcagcttggccgggtcggattccagatagaagtggttgaagtcgttatactacgagcccgagtgattgtctctactttgcaccttcacacttgtcgatgtgttgtgaataggaggagggtaaagtcacatgagaccacatgagtgggtgcaggtgtaggtagacgaaattgcgcgtgcaaaggttgaagcatccatctaccccgcccagcccagccggtgacggtcacaaatcggccatatacatcttcttacctacctccctaggcctacttgacgtctagttgcatgtatagacaagcgacaccaccttgacggacaagtaaatcgagtagatttgactagctactacgatggcagacgtagacgaatcaggctggtccttgaccgaatcgtgagcacctagtcagagccactccgacccccctgctcatctgcctgacggatcggttcccgactccctccagcgaccctctcgtctttacccaactcttgcaggagatcggtgttcgaggactccaagtcgatgacctctactctctcgatcccgagacgctggagagccttcaacctattcacgccttgatcttcttgttcaaatgggtcgcgcagagtgaggacgcttcgggtcaaaaggacgacgaagcgagcaagaaggccggtggacagatcgtcagccatgaagagagctcggattgcgggatctactttgcgtcacaggtcataaataatgcatgtgccaccgtggccacggtcaacgctgtaggtctcgcatggatggctccagctccgtatagactttggagcaattcactgaaggcgccctcgcattcactgtaggtcatgaacatccccgtacaggaggctgcgaacgacgccgagacgatcgcacatggagtaagtgactgattttcgcgtggccgaatgcctgcggggtcctaaattaacaaggctccatcgttcacgtatccaggccgagctggacaacctcgaagcgttcggagctggtatggacccgatgacgtgagtctatggagacctgctccttcaccctctgtcgatctgcaagtgctcatctcctccacgttcgtagcctcggtcacgtcctcggcaactcggagctcctaagaacaacgcacaactcgttctcaaacacctcgcccttttccatctcccgtgaccaaaacccggacaaggagaaagaagacgcctatcatttcatcgcctacgtacccaagatgggatgcgtttgggagctggacgggctgaaatcgggtgcggtgcggcatgggagttgtgaagaggggcaaggatgggttaaaaaggcgaccgaggttattcaggagaggattgctacctacccgcctggctcggtgagtcaatacggaaagaccatcctgcaccacggccgactgactcgatcttgcgtcccgccgatccagctcatgttcaacctgctggccattcgatctgcggcgatccctcgtctggaacgactgatatccgcacccgataccccggcatcgatcataccccagctacagcaggacctcgagcaggaacaggaaaagcagcacaggatgaaagttgagaatgggctccgacggagcaatttggtaggcatgattctggagtgtctcaaacagatgagcaaggaaaaggtgggcggagacgctacagggaaaagcaggctggaggaggcggtagaaaaggctaggatcgttggcaaggagaagcgagagaagaggatgaaagggatggatgtggattagtggtagatacacgtcaggttgcaggtcgactgtagtcgaacaggacatgtatccatacacatatgccccgaggtcgatcgaggattgttgtcgatttccagtttcgagacgattcgtcatcaacgtcgaggtcacctcgaggttgaccgtccaccccaaaggagatccatctcttgacatcgccgtctccttcttatcatgatctttccttacgactatcgccaaaggagactggaggctctgagaaaagactatttgcaagcatggaggagacgggatcaagctcttctccttcccatccggcgtatgcagtccagcgactcgaaggcctgccacccgaggcgttctatatcccaaacttcatcacggaacacgaggagcaataccttttgagacgggtgggtaccacattgaatacagaactggattcaagtgtcggactgacttgtgcagccggtggttttaggtagccgagtcacctcaaccaaaggtgagcagatgggagtgaagaacatcaagagcttggtggatgaaccctgacacggctgtcatacatcgcattgctgcagtggaagactcagagtaccggtagaaggtgagccattgagttcgaggtctcgatcgtcctattctggtaagagctgactcgcattttagagtgcaatacctcggtaggacggcatcaaaccagtttcacgggggtcatcgctcataccccatatcgaccaccgtgtccatacaggaggatccctttcgaagaacaacatcttgatccccgaagcgcttcctgattggatcacccagttgtgagtcaccatatccgcatcaaacacgacggcaaaaacgcaatttgggccgtctgacgggacaattccgctctgcattctatagtcctgccctcgtcgaacggatacgcagcatcgttgcagacttagaggaccgccatgtccctaattctcccgagaagcagaaggcgggccaaaagctgagcagggaggacaagctgaaggaatggactccgcaccacgtgcttatcaacgagtatcaagctggacaagggattgcggtcagtccctgacccggccgtgtgatacacctattgagccacttcgctgaattcatcgcacctgtctcgtaccctctcggcgcgattatcacgtagccgcacgaagacggacctgcctacctaccccttgtggcgaccgtgtccctcggctccccacagacgctcgagatctttcaatacctcgccgaatcagaccccagcccgccattgacgggttctaaccgatcagatgtctttggtgggggtcttgaggaccttgccgagggtgtccgaccaggaggacgtggaagaccgatcgcgacgaccccgatgggttgcgtctacctcgagcccaggtcgttgttcatcagtagaaaggccatctacgagacttttctgcacgggatcagtccgatcgaggaggacgtgttcgagatcggatctgggtcgggagatgagggcagatcacggatgagcctcaagctacgaggggtcgaggtggcgaattcggcctgcatcgaaagttcacttcgagatcagctgcagcatgcgttggacgctggggaaaaggaactggttgttaagaggggaacgcgggttagcttgacctttcggcgggtggaaaaggtgctacagggaggtttgggtgtgggggttctgggtaggggaagcgcaggggctaaacgatgaacgctacattcatggcgctgtcccatgagcagcgggtttatattacgagggacgcacgaaacatgactatacagcttcacatactggtccgtcggctgcctttctgcgcaggaggaacatgtagaatgagcgtgcgcttaatccggtcgttctacaagagttgcgcctcgtctccttgacgactccagggcttactcgaggtgttcatcggtagatcgtctgaacaaggcagtttgcatagattcacggtcgggatcaacttaccagccgtatctcctgtccttctcaaacactcattgaaagcttcgacaccgccctcttgatcgtctctgggaatgtgtagcttgctaatgatctgatctcaatcttgatcagcaagagtcggctcgaggtactgggaaaagcgcactggatcagtcaatcttcgacattctgccttccgaacagtctctgccttgtcagccaaaaaatatgtcttttgatctacgatacggcttaaggactgtgtgaccgcgaccgagagaagcgatcctttccctactgggtcaaacgcctgctgccagcgaagtcacggtttctcagatgatcgcttccccagtcgatatccagctcctccacttgcataagggtaccacactccattctcatgctatccgtcgttactcgtacaatttggttacgtctgaaagatgctggtgcagacctggtgcactctcgcaacattataccacgttgaagacaaacgatttaagggtatcgacaataaacattctacatatattttcccgcggtgctgttcgtcgtcgtctagtgtcacaaacctgcaaagactgggggagggggcgaggtgaccctcccgcaccgtcctctcggctagcagtgagatcggtggtccgtgtcatcagtgcgtcacctggtcggcctcgtttcaacattgagtactttggatactacaagccagacaggtaggggtggcgtcgacctgatgcgccctgtcaactcgagtgaaagaaggggggcggtgacgaatggcggtgacgataagcgcgagtcgaaagagggggggtggcttgatcgaccttgccatcgatatcgatcagagcctcatccctgatccctcatcctgcacgccaagctcaaagcttggccgagacggtccccgcagtgcgatcgcacgaccgtacgtattgtcttttctctattacctgacgacgatcttggaactgcatcgcactcgggggctgagggacctgtccacctctctcgacatccagagtctggtcgatgccggacgaaaggcgttttccccgcgttcagccagaaaagcggggcaaacggggccggccggacctcctcctgtggtagacctgggcgacgttcgggacgacgatcgaacgacaatgcaggggaacaccgctgggctttgccgatagacatgctcaatcccgggtacgagcttactcttgtgtgtgtgcgtgtgcgtgtctttggctgtacggggtgttgaatcgactggtttgccgtgagttcgtcgtcgaggggtggggtggtcccacttttccccttttgacccggcgcgcgcgtgttatttgccgctcaaaagtcaaaagacacagacagacacgagagatcgagatcttgaccagacatcatcgcatcatccatctacttgcgaccacctaccgccatcccgactctcgatatcgccctcactcgggctcacctatccagtagacaagcatacctccagcaaccatgccgaccccagccgatacgctcattgtcgtcctcctcgtcctcctccccgtcctctactattacagggagacgctcccgctcatcgggaaacccgtgaaatcgggcgatcgagccggggtcaacgggaatgctggcaaaaagcaggaagaagagggcgatccgagagactggttggagcagatgcaaaaggccgtgagtcatcgtcgtcgtcgtcgtgttcctcgcccacaccccgatgtcatcctagcggaatgatctgctaacgacgaacgacgcgatcgatcctcccccccactcgccatcctcgacagaacaaacgatgcatcatgttctacggttctcaaaccgggaccgccgaggagtacgccatccgactggccaaagaagccaagtcgaaattcggcatctcttccctcgtgtgtgatccggaagagtacgatttcgccaaactcgacgcggcggcggaagaggacaaggtcgtcttcttcctcatggccacgtacggcgagggtgatcctacggacaacgcgcaaccgttgatagagttcctcatggacgacgaggtctcgttcagcatggaacgggagggaggggagaggttgaaagggttgaaatacgtcgtctttggtctaggtaacaggacgtacgagcatttcaacgaggtcgcgcgcaagttggatagccgattgaccgagcttggagcgaccagggttggggaacgtggagagggagacgatgacaagtcgatggaagaggattacctcgcctggaaagaccccatgtgggcggatttccaatgcgtcaccgggatcgaagagggtgggagcggggacgtcgcggatttcgtcgtccaagagttggaccccgagagtgccgctcacgaaaaggtctttcacggggaactgtcggcgagggcgctcgtcgggtctgtcaacgggggtggaccgacgacggggacgatcgccaagacggggatcccggacgccaagaacccttacctcgcacccgtcaaggtggccagggaattgttctcggtagactcggatcggaactgtatccacgtcgaattcgacatcaaggactcgggcgtcgtctaccagacgggtgatcacgtcggggtatggcctaccaacccggacgtcgaagtcgataggatcctctgcgtcctcggactcgccgacgaggacaagcgtcatcgagcgatcaaggtcgagagtctcgatcccacgttggcaaagatcccgttccccacgccggccacgtacgatgccatctttaggcactacctcgacgtctcggccgtcgcatcccgtcagacgttggctctcctcgccaggttcgcacccaaccccgaggtcggcgaaaaattggccaggctcggggcggacaaggagttgtaccaccgacacgtcgatggacccgccctcaagctcgccgaagtcttccaggccgtcgccggggacgatctacaccaggtcccctcggtcgggaacacgaccgtctggaaggatatcccgttcgacaggatcatctcagtcattccccgcttgcaacccaggttttactcgatctcgtcctcacccaagctttacccggattcgatccacatcaccgccgtcgttctcaagtacgagtctcaaccctcggagcaccacggtggaaggtccaggttcgtgtacggtgtcgggaccaactttatcatgaacgtcaagatggcgcaagagggcaagacggcgcccgtcatggccgatcaggctcaacagcccaactcggccccctcgatcgtccacccgaacgcgcccacttacaagatcaccgggccgagggaacgtcatttcaaggacgaaaagtacctcgtccccgttcacgtccgacgatctactttccgactccctacgtctcccaagatccccatcatcatgatcggaccgggaaccggggtggcacccttcagagggttcgtacaggaacgtctcgctgccgctcagcgagccatcaccaaggccggagccggagctactcccgaaacggccctcaaggactgggcagagatgttcttgttctacggatgcaggaaggaggatgaggacttcttgtacagggacgaatggcccgagtaccagcgtggcctgggaggcaaattgaccttggaggtcgccgtctcccgaagtgagaggcgaaagccggatggtagtgagtagcgacgcgtcgttgtgtcgcatgcgaaacggtttactcaccacatcccccggtcaacctgtttcttgtgcctctctaggcaaggtctacgtgcaagacctcttgtgggacgccaggcacaagctggtaccccttatcctggagaagcgggcctacatctacatctgtggagatgccaagaacatggcacacagcgtcgaacaaaagctcatggccatgcttggggaggccaagggaggttcggccgaagtcgagggagctaaagagttcaagttgttgaaggagaggcaggtgagtgtcgggcaacagcaaggtcccaggggtcgagggattcggtttgctgatcatgccagtccctttcccactcgacagcgacttttgctggacgtctggtcgtagtcgtcagggtgtgcatatggccgcggcgccggcaggagacgctgacaacacaaacaaagtttaaaagcacacaacgatgccggtattataagtgtatcaacagtgctacaacttgagactatcatgcatatatgccatcgtcatcgttcctaatcgctacctctcacttcatccgccgcctctcgctcatctcttggtcgaatgcctcgcagatcatcccccaagcctcttctctcgcggcgccatgtatcctctgcgtctcctttgtcagattcggtgcaatgtcgaaaccgtgcccaacgttcttgaacgttttgcgccataacttgccgtgaccgtctccgacctttttgttgccatccctggcgatcgcaaagccggcctcgttctctaatcgatcagcaaagatttcgccttctttgcaaaggtaatcgttctctgccgtgacgacgatcgtcttggggaatttggcgagttgttctggtgagcacagggctggtgagaggtatgggtgacgcagcttttcggcattctcgggcatgcgcagctcttgcaagtagccatcgaggaacaacctcgttagccatcgaggcaacaccttgctcttgtccggaacgtccttgagcttttcctgaaacggtaccgtcacgtcgatcattgcgtacaggagaccgagacccacgatccgggcatcgagcgggagggcaggtccgtccatacacttgacgatcagggcggcagcgagattcccaccagaactgcccccggacaaggctatccgagtagggtctacgctgggtaagaaagttttgatgctaggcgtgcccgaggtggagaggaactggaatagaccgtccgggtcggcgatccatcgaatgagagcgtaacattggttcaaagctactgggtaaggatgttgaggcgcttttgcgtagtcgggcgagatgacgaccgaggacaacgtatcgcacagagtccggcagaggtgaccttcgttctccggtcggcacctgccatcggttttgaaaaacgtcaacacaaccgcttctcggcatggaataatgcaaacaacgaccaggaactgacatggtgaagccgcctcctgcgagatgcacgactactcctcgctttttgcgtttgcccgtctcctcacccggcttgacccatccccttaatgcgtagtctcgaccgcgcagcggaagatatataagaattcggagcttggggatcggattcccattctcgtcgttaccgaggttgaggtggatcgaccatcgctacaacgcaaggggccggcagcggccttatcgtcaatgtccctgtaaaggcttttccaacttcaggttgaaaggagatctgacctctttatgaaagaatcggtaattgtaaaatacactggctccgtcgaccacattacgcaacgaactggcggctatgaacagagggtggtgatcggaaaaacggtacggtgcgcggtcgatctttacgactcaccagcccaaattctacagttgttccacttggtgtacggtgagaggtcagagccgtattggctggggtcgttaaaggacgccgtcttttcagactcctgcttgtatttaccctctccagactcgggtttgagcgagttttcttgtgtctcggtgcctatatgctctgctcgtggctcggggtgcccttgaacaacgttggcaggaggaatcggctcgctcttggtgtctgacatgttgcaggtttactatgatcaagccgtgggcgtctacgagttcattgtcacgttcgcgatctcgttgagaaccgacgtcccgcctacgatctcaatcatgtttcaggctcgggataccacgatgtgtacctacatgaccatttgccataatcgaaccattctctggatcgcaacgacgacgacgattcgatcttttccctcgtcgcacgcgagcacgtgagcaaaccttaagttgacgtcatattttcatctaacgagtcgacgtcgaccaccacgagggagattactacgggacaatcgttcacgatctgatctgggtaaacgtcacagtcagagcgctcaacattataattattactactgtgcgtcatggttatatctgcagtctcgtcacacaaggacgccctgatgcgccttggttcgtcattaggggtaacgtaggtagataccgaggatcccgaggaaatcgaagaaagtgtagggtcggcatggcattatgtatgaccgacccgcgggctcactcccgttcctgccgtactgagttactgggcaggttgcaggtggcgatagtcatcccttgcctcaccgacgacggcgttccatcctgtatgtgctattcgagtggtctttctgatgagcagattggcgaaattcaccacctgccaccacgatgcggtcggcgcgagcggagtcatggcctgggcatcttgcgagatgtgagggtgagggtattcggactcgagttcagcctcgatacccggtggtggtgcagtatcgacggttcccgatcgcgactgcgagaagctcatgtcagatgcgaacgaaaaaatcacccagagcagccgtgtagacttaccttgaacagcgcgggaatcaagctgatcagactgagcaccaccattttgacaatcaaaaccggatcttgaaccaagctcgcgatactttgcccggcgttcggatcggtatccccattgcccggatctttaggcagcgccaattgtccaaggatatccccgaccgaagccgtgacatagctccaactggcactccccgccgctgtggtcaacaagaaagtcacccagctgacaccgacgaccccgcacgcgacgttcatcccactccatggcacgagacccatagcccgcatgatcaagagtcttcgccagacaccgccttcagcagccggggcgggctttcgaatcggttgataaggaccgatggcaagggctggttccgtgttgcccttgatggccgatcgaacgatagccagcggtttgggaaagatgagcgcgatcaagggggcgagcggtcgagaaagcatgtaagctccgagcgatccgaacgaggtgatcacggtcaaaaggatgaccgcagggatgggtgacaggagcgatccgacgaggatgttctgtgatggatacgagctcatcagtgcgagccgagcgatgccatgctcatttcaacgtaccagtatgagcgctccaggtatactccacgaatgtttccacatgcccgtgaccatcaacacgcagaccgtgtgccaccaccctgtcgtactcgatgacatgtacgcccggatctcggcggagaggatttgcagatcagagacttttttcggcagcgagtgcaaggatgtactgaagaggaatcgcaaaatgtcaggacgtcttatcggaaccatcatatggcctgacccagactctcacatcggcatgctcttgatcccgaaagcgaccaccccaaagctcgcgaaaaagacgatccccatcattcccaacgtccacccgagctcacccacgacctgtttgaacgccgtgttcatcccgacggtggcatcttctccgtccgatttgggtagcagcaacgaatcgcttcgacctctagccaatcgctcggctttagcttccgggctggaaaagccccccgaatgtttcatgacaaaagcctcgcctcgacccttgctcgaggtgcctgccaggtagtctttgactcgccagaacgaggctgtaaacccgtgatcgttcgacatggctccaggtctgcgtcgctcaaatagcgagctggacgtccttcccgatgctggtcgaccttgcaggcctgaaagggaagccctggacagcgctggggtgggtaaagtatctgtcccgcgtgatggaccactcgattcctgagatgcgtatggctcgaggaaaaaataggagccaccatcgggccgtctcgatgaggacccgcctgttctcgtcgatcgtgctccgcccgtccttggagcactggcagcggtaccctcgtcgtcgcttggttctcgactattcagccccttttcggaatccgtatcctccaggctcctccgcttgcccaacgagatccacgaacgggtctgcctctcctgctggctttcgtcttcatcggccgcatagtcgtgatgggggatcgacgcgtacctgcccgaatttgagaggttaaatccgacagccttgccgagtccttgaatgacgcctccgaagacgttgaatcctgacttgctggtatcgtcgggctcgtcctcgttgggaatgctgcctcgaggggtgatgggataactagccgtccggtcgacggtcgagacggagccctcaccctcggccgtactagagatcgtactcagactcgttctgcctggcggtggactcagcacggggaccctcgacacgatggccgggtcgtctagatcgagttcgagctcgggggaagatggctgagaattggactcttccaggatcctcggttccagcgagggcgatggagcgaaccgtgggaacgctttcggtcgtcccggcgagatcttggagagtcccaggctgttcgagccagaatcgtccgatccgacaggcaaggtcggcaagatctcgtccttgcctaccgagcccgacccagagccggatcccgaggatttgacattgggcgccgagatcctcctcgtcaaccccatcctcgtcggggcgggactagaaggcccacccatcgattcgctcgacgtcggatcatatggcctcgtatgccttgcatgaagatcgaccacctcggggtgtttcgctatacttgtgctcctcgaccgcgtggtcgtcatcgctgtgttggttctcgaggcattgtccttgctctcgacggtctcatcgcgggagggccgacgttgctgtagatgcgcataccgatcatcgtcaaactcgccgatacggtccagcaggatggacggtgcgcgcctctccggcgtataactcccgctcccgtgatgtgtcgtcgtccgtgcgatcccaactacctgagacggtcttccgagcacagatgagacgctcttgctcgctggacggttggcacgacgagtgggctcgagcgatgcttgatttgttgacgtctgtgtctgtgatgaagacgtgccaccggaagaggcatggatgttgttgttcatctcttcgtccaaaggcacaccctcgaggtgaattgacacggaaggcacgtccttgacggaagccgaccgataagccctcggtctagactttcctcgcgagactgatgcagatgcacctgacgcctgtgatgcttgagcttgaacaggcgagaggtgtggaggttgtcggtcctgcctcgatgcgtaagggctggacgtcaaattcggactcgagagcgtttgagcttcctttgatgtcggtgccgacgctgatgtcgaaatcggtgttgacggggttaacgacgtggacggaccggacggtgagggtcgggcgtctgatcgtcttctcgcagatccaggtgtcgagaggatattggtcgtcgatgcccttctcgccagagattgcctctcgatcctactagctcgatgcgtattgactctcagacttgaatctagttcctggcctgtattgttcgtttccgagaggctgggtaatctagtttgagaatcactccgggtcggtgtcgagggggatgtccaggtcctggtcctagtcttgctggattgcgagggtgcggcctcaaggcgggcagtggtcgtatcgcccgagctcgccgcagctggagtaatagtaggcgtggggaggacgagatcgtcttgttcgtgttgcgaattgataaaggactttcccctgaaatgccccagaatatgtcggcaggtgttaggtcgaagaagagccgtgcaggtcgttttcccgaagggacgtcaaaggaccgaagaaccgcgatatcagaaaaagttcgacgatcagcgaaaacccgattcatctggaatcccaatcaagaaaagtacgacccctgagactgacctcgatcgagcgtttgtcaactttggccgatgcaacgatcctcctacgactgctgaactggaacctctttcgaatcctggtcgttgatcggacgttcgaccagtagtattgttattgacgtcgctgccaccggtttgattatcgtccaaatggccgctcccactactgatactagtactacaatgatagggacgctgttgttgaggaggatcgtcacgcagatcgcctccaaggtcctttgacgacgtccgtcgagatgtgctcgacgacaacgacgacatcatttcgtattccgtcttgttgattcctcgtcgtggcttgtccttctggctcgtctcggtaagatcccctctgtcgataccaacgtactgactacacttgggtatgatcaaaggacctttcggttcgggcggcggcgtcgcgagggcaaagggcggggtatcgctaggacggtgaaagaagggggggagagatgcgttgccgggtggattacgacgtatgtcccactgtgggagaagcgagagcggttcgggctacgatcagagcactggcgtaaaccccgagcctccggccggccgtagggaataacggaagtgtgagctagtgagatgttcgtgaagccacggagaaccgcaagaagcaacagagcgtagcgaccggaactgcgcaagtctcaagtcgatgtctctaatctctgatctctgcgcgagtcgaggttgatcgcgtgcaacacgctgagagcaaatcgatcggcaaacgaagacggactctcgcgagaggcgggcatcgcatcgaccgcgaacgccctatgacacctacgacgattcttgctaatgacgcctccctttttgggtattgggggatgaccgatccaatgatatgaccacgaaccggtcacgatggcaataagggcggcggcccttggtcaggtcccgagagagcccgctctgtcgaacgggctacgctgccatcatagaccataggccataggattgtcacgctctcggcctgacttttgaacatctgcggcgattacgcaggtcatcccccttcgccgaagccactcgcgagggcggaacacgggggcctttgagcctggcggtcgaccccgtgagcccgcaggtggaggttgatcaacaagatcatcatcatcatccgatgccgctcatgtcatcgtgcatgactagcaacccatgaccgaacccagaggggcacagagtagtgacgcgagacggtgtcgattttctttttttgggttcgtcgcccgtcgccccccttcatcgtgttttcctgatcgaatggatcgttcgagatacttggaacgaaggcatctcgagtcagcttccggtaatcgctgtgcagcgtgaacaagacctcttctcagacatcttcctgtcatgcctgtcaccgtcttttgctctctgtcgatctgttgttgttgcaccgagacctctcggcttctcgccggtcccgacccacgatcttacaacagctcttggcgcggcgatcagacgaccagggatcggcgtcttttgtgtgctccggcgcagggtacctccgccgcctattccgacggcctgcgctagcgtatcgtcagagtgaactaggagcatgtttgcgataattgtgcaatggtttcaggtcaatacgtctgcgtaatacacagcaatatgctaatcggatcacgctccgattgtggcaagtacaagggtgtgaggtataagaggtcaatcccgcgtcgggcgagtctatgccgctgcacctggcatgtgaagaggtcctcacacctcactacccgacttgctcaatgctatcacgtccccgccaatgaccggggatgacgataataatgtaacttgaagtcgatgaaaatgaatgtcgatgtatgtactggggacgactacgtgccgctgattgagagccggtccccgttcgtgctcgtcgtgttcgtaacaatcaaacggatctcgttcggaaaggaatggtcgaggggtcggaagatgtgccccttctgtttgtaatagtgctgtcgtctcgtatgcatggtattgtcagggacaaggctcgagacgcgacgccttgtcctctcatcgtcgtgctcgtgagttcgtatgttgtgccggcgtaccgagcgtcgggaattggccccgatgctcaaatgtatagctccttgatccccttgatcgcgccttctccttcctcccgtctcctccccgatgctgctgctgccgccgccgctccggccgcgcctcgtgtccgtcttccttcgttggcgttgttactgctctcgtccacgtcgtcgagtccgccaccaattccccaggcctcggcttcgatgcgttcccgacgtccaatctcggcccgtctcttcctcgcttctcgcttggctttccctcgcaagacctggtcgtcctgaccgggagtgagaccatcgtcgttcggctgggctgcagacgagacggctgcatcgcggaccttggccatgttcttccccagtacgctaaacgtcctgcggccgtgggctccggtagatcccgccgaggttccgtttcgcgaacgagtgatgcggcgggaagattgatcggtcgccgacaccgaagtcagttgacgtttccgaccgtgggtcggacgagctggagaggaaatcgggacggggtcgatcgaccgtgagggacctggtcgagatgttgatcctgtagccgccgcgccaataggacacgtcgaggcggtcgtctcggatccgtccgagcctccaccgagactgacagtgcttcccgtcctcgactcttggctgacgccgaaactgtccaagctcgactctcgctgtgtctcgtacccatcatcgccatcgtcattgtcgtttcctccgagcccaacgcgtcgagacttggtcgacttgccctcgagtcgcggtcgacccataggtttgatctttctcccatccgccgatccggtcggggtacctgtggcgtgcgagccacttggcgatggggccgagtcgacgtcgcgatacgccaggtgaggcgctgacatgtcgtccgcctgccaaccgggcgtcgaatgatccttgcccagcttggactctaccatactcacgctcctctcgctaccttcagcctcatcgtcctcgactccgatcacggcaacaagatcgtccacgacggtctcccatggatccccgcgctgcaggcgtcgtcgaatgtcgtcttccgagatgccgtggtcgggcgggagcgagcgcaagacgtacttgacggactcttcaaccgcagggtctgcgatggacgattcggcgtgcggtgcagaatcggcggtaggcagggtagtctacgacgtgcacgaggcgagtgatgtcagtgggaccggtctcgatcggcaaagcgggcgccctgaaacgcacctctttgatcctgggcaagcccttatgggggcccgccagattcctcacgctcgagtagtgttcgaatatgtgataactcacgtataccatccccgtcccaccgccttcctcttcaacacgctcgacgggcggtgcagacgaggatgacgcgatggccgaggatgaccctcctccaagatccgctgccgaagtcccatgaggcagagcccgaagcgtattcttcgacgagtcttccagcggggttggagattcgtcccgaggcaagatgatgtagacgtactacaaagatcgtcggatcgtgtcagctcggttgttaatgagagcagtctcgatttgagggtgtcatattcacctcgggcatgatgaccttgaccgcccggcctttacaccgagcaaaggctgtcaattccatgtgtcctccatacgtgcctatgcgccgtatgacgacactcgtcgtcagccttctgagcgctagacgccgagttgtggtccgtggactgacctcgttgacgcatgaccgagaggtagtgatcaaacggccgttcggtatcgacgaacccttcgaaactctttgggtgggcttccatgtaatcacagatctaacgtggccccgaccgacccgccccgaccatgctcggatcagtctcgtcgtgccatcccgcccgtgtcgacgatccacccacctcctgcctcaaaccgagatgcttattgtcgttcccccagacctgatcgctgagggctctgaacatgcaattcccatcccctaccgtcttgctcgcataaaggcccatccgtttgagggtatcgttcaagagccgttcggtcgtctccgggtcagaagggtcgagtagcctgtgcgcctgtcgtcgagtctctgcacgagcgtcaaaattggaaccacatcatgtcaagtcagtccgagtcgagtcgagtcgggtcgagtcgagtctgaaacagccttgtcgagagggcgttgacgttgggtatgacgatccgacttacgtctggcacctccaccccctgctaccttgccctttttccccatcgtcgaccctgtcgcacctgattcttcccccgccgcacgtcctttccggccttttacggcggggagcttcttactgaccatcctaggctcgttcctggccacgccgggtgggttggtccttcccactcggtccaattggggtggattgccgccccttggaggatcgagagagtagggtctcgtttcgtggaagaagaggtcgaccgatggacaataatgttagatggcggtgatgatgacgaggatgggtaaggggatggggaacaagctcataagctcatccggccggtcaaggagcgtcaagtcaaagtcgatcgggacctccgagtctgaattcgcgcagatctggtctggtctggttgatccccccgcgtcagaaatctcgtccagaaaaggttcagtcgatgacgctaaagggaagggaagcggcgactcgtattcgtccaactgctgtaaagtcgccgatggaaggtggctggagagttgacccgtaagaacgatctacactcccaggggtatcgcccctcgtcgacgtccacaagaagtaggtagtaatagtagtagtggtagtaggtctcgctgatcccgttgtcgaaatcgggtccgatccgatcgtcaagaaagtcggtgcgtaacttctctggccgggaattcgggggggagaaggatggtcaggaccggtttcccctatccaccagtctctgttctgcggggtaagttgagccggtcgtagctctgagcctctcaccctggatctacgtcgactgttcagaaggggtcacaacggtggacgatgcaactatggtgctcgggtgggaatgcaaaggatgatccgaggtgaacgaacgatgcggaagcaaatttacaagattcgactcgagaaagcaaacgagggcgagagacaggtccctactgttgttggctctggcacactgagacacactgcagcgagcggatttcctccctacctggcctctcgtcatatcttggcaaatgtcgaacgtattcgagatgacaacagcgatcgtgtgctctcttttcgattagcaagttgcaagtagctagagtgtaatctctcgcccgaggctggaggctggggggtttggatccggccaaacgaagggaaaaggggatgcgggaatggggatgatagggatggtcaggttggaaagaagaggggtgagggaagggtggaaggtgatgttcgagagaagcatggcaccgagagatgacaaggtggccgtatgcgtctgcaaggccgaagcgagattccagcggcggagagtcaagaggatggtcagcaggaggagatcgaatgtcgcgataaggggagtcgagggctcaccgcggtgaaggagaccaaaaaggcgagaaagtcctcgtccacgagatgcctagccacaaggatactgtcgctcaggttgaccaaggatgagaaagcatcatgtgcgatcatctacaaaaaagcgcgcgtttgagataggggcaaagaggcagagagagaggataccattgtcagtcaacctcgttctcgctcatccggcaagaccttgcgactcacagcctgatcccgacataacgtctttaaatcctccagcatttgcacctttcccctttcggtctctgacacgcccacaacttttcccgcctggatatccttccacaccggggtgccgccgctgggcacaaagatgtttctggagacggccgtcttgggggtatggccggcgaggttggccagtgccagttcacgggcatcgggattgggcgcgtgtaggaattggaagagctcgctaaggcctgacatggttacttgcgtgttatgaggtaggggtttgtgggttgtttgttgttatgactgtgtaatatcgatacgatcgaacatgttctgaataatctttcaagaggaggcccgatgccagatgagagatgtctcttttgactttccaaaggtggaggtcgatggaaatcaaagtggccaggttcgttgtttccacccaagagtcaggtttctggaggaagatgtttccaccttgaacatttattggttatttccacctctcacacgatcaccaacatccattcatcatattcaaaggcatctaccgactcgaccaaaagaatcatcgagacaacctctgacctaaccctctcatcgcatccgcatcgccacacacgcatcatgtcaggcaacttccaactcccagccggtttgaaacccgcaaacccgccatcaggagcaggcggtcagcaacaaggaggacagggcgggaacgatgaagaggccagggcggcacagatgcaggctcagcagcaggaagaggaaatgaggagaggcatgttgggccagatcttggaacctagcgcgagggagcgatgtgagtcttgagaatcgcgggctagaacgaagttcggcgccgtcttgcctagagcaaaactatgggctgacaagaaaaccccttgctcttccttcctcttcctggtactccccaccatgacgaatgaccaccgcactacccttcttctccgctctcactctttgaaaccccgcccttgtttatgacccccgcagtatcccggatagccatgatccgaccatcgcaagcggaagccatcgagcgccaactgatcaatctcgcccggtcgggccagttgacgaggaaattaggtgacgacgaattgaggtccatgctcgaacaggtaagtcggcgtggaattcggtggcatgcatcttcagtttgaatccggcttcatccgtattgacgaacttctcctcctctctttttgtgatgccgtctcactccctggtcgttttcacaccgcccacctcccctacaccgctacctatcacctcatcacgcatccccggcacggcccacagctctcatcctcccaacctaaaccacaacaacccaccgtacagccgaattcgaggaccaagtcgctcggcggagggatcacggtcagtctcgcccgccgttccccctgcgggtaggacttttcatgcatgtattcagctggctgatggacctcgatctggattgtacggtgtgtgggtcgagcagatacagaggaagcgggacgagtcggattcggacgagtatgacctctaggacgatcacgcgctgcgtcgatctcaagctcgcatgacgggtgaaccgggtcaggcggataggtttcaagcgacaatgagggcgtcgaagcgcgtcgttgtatttgtacggtgtgaaggctgatcgaataataaggagcatcgagttgagcgtataagtcgtcgataaaatatgatcggatacccaaattggtactaactattttagtcttaaccctcgaccggagaatgcacttgttcgaaatacatcatcgccattcaagccctcgctcaggcgtttcgactagcgtgccaggtatcaacctcgttgttcatcggcgtggtcggaacgtcctcgaaagacagactcagatagtcttacgacttgctcaagtcatgatgcccgaatctctgagtttcttgaaacgtcgctgtcggggacatgaccggctaggggtttcatgaacttatgaaaaaagtatgagctttagggtgtccccagcagcagccttttccgatcgcaaggtgcattttatgactttgtgctgaatgtcggttcgtttccactttctggtaggctttgagacaatcatcaagcagatgaagctttgacaaacagggagccgatattttcaaaggtccatttgtcagaacctagagaaaagaagaatgctgcgatcattgacgaaacctcgaaaccaccacggcattacgtggaatagcatattacgtggacgccttcatgtaggagcaagcgatctgggcaggttcgagatgtcaagccatgctccggttggcccccttgtcaacggaactcgatgccggatgacgagcgcaacacagcaccacgtgatgaccgatatgccttccatggccaaacacataagggaggcagagcggagtatatcgaaaacttttgccgagggatcatgtgacagggagccaacagcgagataggttggacaggtgtcgtgatatgactcctttcattatcgacccctcgcagagccaccttgaagctgcgagtgacgtatactgcgtttggcgacggtttacatatgcatgcacatatatacatacatatacagatgcttggaatccatcactcatcaggggtagatacacttcacgtcttttccagatcctaccattttaaaccacatcaaacccgacttttggaacatctggcgtttaatctcattcacagaacagcgatatctctgtcacgatgccaggaggtgagacaggaccgcagtccccaaataagttcaagcgcaagcaacccggaaggaaaagcaacgggcatggacacaggccagccgagccaaagcttgacgacgatgaagaggatttcttctttcccaacccatacgaaacagcgagcgtatgcccttccgggtccgaagaggtcagtactaaaaccccaaaatggagtgaaatttgctctactgcaatatccaaggatgtgacgggcttcacttacggcaagaagtccctgagctggcttcagcagttgggctttcagaagtcccaggaaggtggcggttcgaccgtcacaattacgaaagagtcgaaaaatgagtaattaggatacttgtagaattgaattgaggtgtgcgcagggtataaggctatcgagccgcattgcgtaccgtcagatgcgccatggatcctgtgccaatgtttcaggtctaaccattcgattgcccatgtcgtctgaccatgtttgacgcgatccacccccatcccggtgaagcggtaaacgcgtgagaaagctggaattgatcgaatccagcacacacacaacccaaccttcgcgcctctcgagaccccgtcgttcgacccagcgttcacaaagaaagagttcaagatcgatacaacattcacgcatacatcgttgtctattccttctctacatctcactttcgtcagagtaaacggtacgcttgtgattcacctggccaaccagctcgcccaacccccgctcggaacgctcaactcgatcacgttccacgcgttctttttgtctcgataaacagaggagatccgtactctacctttaccaccaatcaataccccatctcaacacacgaccggtaagtggacagcgagagcatgtcgatggagccaggagaagacttcgggagtcagatcgctgacttgcgttacggtcatggtgtctaaccgttcgggtgcaattccgtttgggcgatcatcagtttagggtatacgtgagtccacaatatgagcaatgagacctggctgttgccgtatcgtcaattgatccattcacaactctctactatcctttcgtaatccctggttctttctgacacatcgcatcgctaccccgacctcgttcacgatgatacagacaaaacaacaacaatgggtatgtcaagcactcgatcacgctccttctcgttccacgtcgcgacttacactcccgatcttctcgattaaaggtctcaacttttcaaagctcttcaacaacatgttcgggaagaaggagatgcgtgagtgatgatgaacagtcccgagttcacttatcgcgaggcgatatgatcgagtttctcggggggaacgacacgcgctgacgacgaaacgatggtccgggttgcctcatgcaggaatcctgatggttggtctcgatgccgctggtaagactaccatcttgtacaagttgaagctcggagagatcgtcaccaccatccctaccatcggtgagtcctcgtctgcctcgccgacgagaatgttgtaggacacacaggaccgcgtgctcatcatatcgttccactccactgcggaatgcaggtttcaacgtcgagactgtcgactacaagaacatttcgttcaccgtgtgggacgttggtggtcaggacaagatcaggcctttgtggcgacactgtgagtccgacgacctataccgggatggcattcgaagcatgacagatcgcttatccgcgtctctctctggatgaatgtagacttccaaaacacccagggtatcatcttcgttgtcgactcgaacgatagggaccgagtcgccgaggccagagaagagcgtgagtactgggatactggggacactcgacttttgctgacgcatagcacacgatctgtgttaacggtatcacagtccagcgaatgttgagcgaggacgaattgagggacgctcttttgctcgtctttgccaacaagcaggtgagtcgtgcgacggaatgtatcccgcgaaacggggcgaggacgctaatcatcaccgtcttctcgctcgcaatgtaggatctgcccaacgccatgaacgctgctgaccttaccaacaagctcggattgccttctttgcagtgagttctcatctcggatagcttgggagacgctcgctgatcatcgtcttttaccctgattgtaggagccgtcaatggtacatccaggccgcttgtgctacctccggtgacggtctttacgagggtttggaatgggtaagtcgaccgtcaatgttttattgtcaacttgacgctcacgccaacgtgttcccacccgcagctgtcgctcaacctccgaaagcgtgagaagtagacggacgaacgacgaggattgtacaagggggaaggaggcttgaaaggggaagatgctgggtgatacgggctcggtcggacggagcgaattacgcatcagcgggttaggggtcggaacggtccctgttccaacgatcgacctcggaggcggtccatcgtttcgctcgaccgagtcgcgtgatcccccgaggagacacgcgaagcgtccggtttttgttctttactttttttatctttgtttcgcggctagttagaatatcttggttgtcaagcagatgacaacatctctcgctcttattcccgtccttgattgaggacttctcgctgccgctgtgagctgttgggtacggcttgagccgtaaaccggcaataggcaggtaatgttctcgaagcgaggtcacgcaagcgagaaagcggaaacggacatgttgttatctgacaagtccgtggaacgaaaaggcaagcctcgactccctctcggacgagtatataatccaaagctttgatgatcaacaacttctccttccacccccactcgatatacttctttttcttcatcttacacgacttcgacttataaccaagggccatatcggcgagatgaatccgctcagatacttctcgcccttaacgtggatggtatacctacatggcgtcgaagaagaggaaaaattagtaaaaaggactttcaaaatgcttgatggatttggtgttcgacacagtcgggcgggggggttacgaccccttcgtctggcgtggtctacaggcttcgctttccgtcctacatctcccgttgttatcgatatgtttctccgtcatgattatgccatcgtcctcgcctatacatctcggtcgtgctctgtgcaaggaattccaactcgacctcatatcgagtctgtgcgttgttgacgaatttgtgccgagaacttttgcgataaggtcaaacatgtcacgtgaaagctacgaagaacggggaaagatgacgatcgacggggcatccgatgagaaccagcatcttgaccaagattgctttttggctggaatacacctccatcgcccgaactcttataccctctccctggcaaatcgacccacatctacaaccatgtccagacgcgacgatgagcccaaggaagttttgaacatctcggctggcaatcagccgatcacggaagagcccaagacgcttcgacctgaagatcggcggacgggcgatttcaagcaggatttctggtccgcctttagggtgagcccatacacatctcgacggtagttttcggagggtattgatccaaaacttgggatttctatttctcagcgaatacgacctgtggatgacttgcagagtgggtcgtcaatcgatcacagctcgaccacaatgggccactaatctgaaacacccgtgctcaactcgctagacatcggaaccgtaccatgcgccagagagtcattactaagcgggatcgcaggaggtttcgggatcggtggagtacgatacatcagtaaacgaagtgagtcggctcgagcccgcgtcttaatacggcgatcgcaggctgatcgcgagttgccctcgtatcgccttcgtagtggttggaacggcgacgaattgggctgtcggatcgttcgtagggatctcactcatcatgtggtgagtcgacacattcaagcggtaaagatatagtcacattgctcactccgacgtcgatcgtcctcagggagaactgtcgacggaaacgagcaaaagagttggctcagatgaaattgatcgagaagcaattcgcacaccgacatgtctccaagctcaagcgtaaggatggactggaggcagacccgaccggcacatcaggaccagtcgtataatgccgcccgaaatgtattaataccagcgccgaacagcggccaattcccaccattcatgctcatcagtcgctgccgttttccatgccacagaggaattgccatatcatcgtgacatcgtgaacacatcagcatgcatacaggcgaatcgtgagttgtacgtagttcttcagctgacaaccgcatcgcagcggctgcacaggctctccggctcttctgcgatggagatccaacatcggggacacttgtgcttcgcggacgggataatctcgaggcgaatcggagcggtgctgtccgatgctgtaacgacaaagccagagttaggtgcagtacaggtcgacttgcccgacttgagccggactcaccgagttggacctcgttgctatatgtccacgcggaggttccctcgtcctgattgccgtgcttgccgacgtggacttctgccacggagaagatttgcgcaaggtcttgttctaaggacgattcctagcttcaataatgacacccatcgatatcgagacatggaaactcacgatgatcctgcaacatgctttgaacgccggcgtctccgccgataatacgcaagacagcttctttacccgtcttcaaagatctgtcgaaagggtgagtatcataagcaaagagcagtaacctactaccgatcgctagcgtctcacttgtcattccgagcttgttccaagagtagcatggtatactggcggatcttgagcaaaggttccattttcgttgcgacatcggccgtgtgccattttcgagcctgatgatgtgatgaaccggcattgagagtcaacacatcaagctccaagtaaactcgggacatacatcgtcagtccatatcgtcgatgggccttcaggcttttcggtgtactggtgggatacttcctcgcttagatgcggcgtaataggcgccaggattctggtgaggcggtagagaatctgtatcgattggtctttgttagccttctgctctatgagacagtgttgcatcgagagctcacgtgacccaaaacggcagccacagcctgacgacgtggactgatggccgagtcacaatagaggatatccttggtctcttcgaagtatagtgaggacaaagctcctgaaacgaaggtattgatccgttggagagctgtattcaatggtcaagtcatatggtcagtacagcttcagtggctatcgaacagaacaaaagcgcacctcccgggaagtacagatcctcgtagtcccgaatgacctcgctctccatatctgccaactcgttcaaaatgtgtcgatccaactggaccatcttgtcaatgatggccctcgcattggtcgaaggacaggaactgagcttactagacccagctcgacatgcttgaggcgcggcgccggttgttgagcccgttgcgagttgcccagcaaaaatttgatgacgtttcgaagctttcttgcattctccgcagccgtagctaaagaggtcggaccgatgtgtgagtctttggtaaactcgaccgaagccgcccaaagtctgagggtatctgttccgaaagccggttccttcttcttgtcctgttcaggaaaagcgaattagcgagattgagacttgctgccagaaccccgactcgccttgccgcccttgattacatccataggcatgataccattacctgacgatttgctcatcttactgccatcctgagccaatacgaacccgtgcgtcaccaccttgctgtatggtgtgaacgcttgacctttttccgccgaacacaacctggtcaagagcgaagactggaaccagccccgatgttggtccgatccttcgaggtaaatatcggccagcggttccgaatccggcttgaagccttgatcgcgcaggatggtccacgatgagccactgtcaaaccatacgtccatcgtgtcaaatccttttcggaactcccttccagtggacttgagcgattctggtacgaattcgtcgaccgagtcgctccaccaatggtccgttcccctttcttgcaagatgggaatgatgtgatcgagggtctcgctgcttaggaaaggttctccagtcttggcatcatgcaacactggaatagggacaccccagcttcgttgccgggaaatgcaccactcagatcgaccgttgatgaacgactgtagccgtcgtttcgctacaatcgctgtggtcagctttgagaaaagaaacttgtcgaatcgaatactcggctcacattgagaaggcttgaagtcgatgccttcgatggctcgtagtgctgtaggcttgactgcttctacatttgcaaaccattgtggagatgatctacacgtctggcaattcagcattgcagcacgaatgatgtgccacaccgtcgacgcaccgaataataataggctctttggtcttccagtcgcaagggtacctgtgatggatcacgtcctgcttcaacaggatcccgctctccttgaggatatcgaccatggtgggaaccgcatctcctagcacgctcttgccgacgagacggttagcgatatctttatcctttgtccaggacaggatcttctcggtcaagtttcctagatcatcgaccgggcatcgcatctcggcgttgtcggcatcgactcccaaagactgtcgaaaagcctcgtagtcctcctgtccgtgccccggggccgtgtgtaccagaccggtaccggctccagaagtcacatgctttgaagcgatgactttgggcttcggttgcgcagaattccagaagaggtgatcatagcttgttcccagcaggtcgtcgcctgtagtcatctttggtgagcttttgtataacgtggactcgggcatcaagactcacctccgaaagtcgtcaacaccttcagctccccaagtagttccttaagcggttctagccggtcgcatcccacaaccaataagcgatcgcttccgggctgttcgacgatggcatattccatcccgctactaatcgctactgcctgtactccttgtcagcgtgcatttcgatccagaagtcgatacatcgacgtacctgattggcagcaagggtccaggctgttgttgtccagatggccaaaccgagatcacgaccgtgtccaaccttctcccaagctttccgcagcgcaggtgacatgtcatcttgtgctacttcaaaataaacataaaccgaggtagatttgtggtcgtctttccaagagatctccgcttcggcgagcgcggttcgggaggatggcgaataataggtcgggcgttcgcggtgttgtagtagagctatcaataccggagcatgtgtcaacattagcactatcgacgacttcaacaagcgtggtgcccaccttgttcgaccatctgctgcaagagccgcaattgccggatctcgaaatcctggtctgcgagctccgtctcggtcagctctgcttattcgcatatcgagggcatcgggacttgcccattgtcctgtatgttccctttggcgaatcccagtccgccatgacacccaacgctcgaaattcggtcttttgtatctcgatagcttcttcggctgtctttcgggctgcttctcggatcgcctttggggtgagttgcaagtgggatttctgatcgggcacgacaaagatcgagcgtcaacgaaggacaaccggccgtttcatacagaccgaaggactcactccgagtgctttgagcgatttgtgctctataggcagaccatggcagtcccaccccgggatatagctatttcaaggtcgtcagctcgagaccctgtttcatatttcaccattgtgatgttcttcttgaacttacttgactctgtagcccctgagcgccttgtaacgattgatgaaatccttgacgaccttgttcaatgcatgccccatgtgaaggtgtccgttcgcataaggaggtccatcgtgcagcacaaagatgggtccgctgttatgctcccactacgcagcttgcaatcagctggcaaacatatcggatgtatgacaagactaatagatataacctacctgccacttgtaaaactcggtcgatgtcctatctcgccatttgttctcctccttcacgatatccttgtgcttcatcggaaagctcgtctgaggtagcaacaacgtatcggaccatgatttcctcagctctgtcgaagtagatttgtatcgcaatgcaagcgagctaatactagagctgaagccagagctggagctggaaagaccatgtcgatgcaggttgcgagagacgcctagacgaagacatgtagccatcggaatgacgaatgtgtggaccgcctgggccggagatgttcagcctgtcaatacgagcaggcgatcaccaagtcagacaatgtgcggcctatgcgaggattaaggtagtctattatgctatcatcggttgaggtcaggacaaatcaatgcaagagaacagccaaagtgacttgatgctcgtgaatcgctcgatcgagattgtccgatcgacccaactttccgaaagatgcgaccggcgcgacccgactcacaaattcccgaagacacgccggacggtctgaccatcatgcgtacccccacccaaactcaaagtcgcgcaaatgcagacacaactactagaccatgtcactagtgtgaaagatggggttatggatacaacggatttctagagcttcctgtgatgtatatgctatgtgcgtgcgtttgcgtgcatgtcgaccccgtccggccatgactccgttccccctcactgactgtatggctccataaccaagctcactgaaggcgtccgttattggcccaatctcgagtgctgatacggaaatcgcccgtcagtcaaacgtgggaacgttcgacattggcacgaggactcaccccatttgggtcaatcgactgacgcatcgcgcccatgcaaagaattcctcgtctgccgggacgattatccgtggtcagtgattggagcctgtgtgtgtcacagcaggtcgactcacctccagagaacatggcggatgatttgaccacgtcgtgtgctaggccctgtcgatgcatcaatccacatcagccttgcatggatacgcgttggacgttacaacacgaccacttaccagatcgtccatgactttgaggaaagtcgagattcagccatcagcgctaggcgggagcagatcccacgccagacctaaactcactgcttcgcatgtgcgcgctgacctcggtcgcgttcttttcccggtccccaccaaagatctcaaagatgggtacttgcgacgaaatatacagccgcgtcttgttttcgtaacaagctatccgatgtccaaggcaaaaccggtggtcatgttgagtcccatgtgacggtgagaatcgtatcgcgcgaatgctcaccatcgatgaacgtgatgaaccgccgagcctgtgtgtcgaaaaagccgactggattcagtccccgggtaacacggcccaaaagctatagcgccgctgaaagacactcgacccacctggtccttcctatcgagcccgagctcgggcatatcctcgataaagatgacctcgaacgcgcccgtgatctcgaggtaatccgcactgctcaacggctctccacatagtttctcaaaggggaacctcgccaccttgctcgtactctgcgggatgatcaatttcctaccccagaccgacaactccctgttctctatgacggggtccgggtgatcgacgtccgatcccgcggacgtttgcgaggcgaacagttttgacatttccgagcggacctcctcgttcaacgggtgaaagtagactttggagagcgctttcgggatctttcgataatctagcgtccaaggagtggttcgatcacggttttcgcattgtccggatcaaaggaattttcggataagtctcagggaacacagacaggctccgaatagcaactcgaacgagctttgtgactcaccagtctttgaatcgagatcgacgatctggaacttttctttgatcatctcgatgcacggctcaaagctccccctttgaagtccattcttgtacaattcatccggatgtcgactatcgggggattcgaaccactcaagacccgtcagcccgggttcgccagctcgtcatccgacacgggaaccagaggcagcggggctcactttgaggtgatgatgcagaccatgccgtaatccatcatcctatccaacaactgcctgaggatcatggcggtgacgatatccgtcacctgaaactcgtcgaaacacaagatcctgccttcctcgaccatctccctcgccgcttcataaatggcatcttcctcggcgacgaccgtgccacccccacccccacgtcgtcgagtgaagagctcgtccagcttgaacagtttcaacccggacaaggcctcgacgcccaccgcccgttcgtctgacctcccctgcatggggtcgtacccgcgttgtttccttatccgttccttggccagtgggatgtggctcttgatctccctcttcaattcccctggggtctgtggaggttgcgccgacgtcgggagcccatgcttgatcgcgtggacgcggcgaaagacgtcgagcatgaacgcgtggaaatggattcgacggcgttggggatgcaagtgttcgggcaaggttgagtagaagaggtccatgagcatcgtcttgccacatccgacgtccccgaagaggtacatccctttagggaccgacccggggggcacgacgacgtgattcggggaggtcgagctggagaaccagttggagaaccagctgagggacccggcggtcgacgccgaggaggtagggacgggtggaggatggtattcccggagttgccaatgcatcttttcgagcttgtcgatgatcgtacgttgatgagcgtcatcccggagcgctccgacctggacgagctggttgtacctcgacagcggggtgatcggccctttaatctcgctcaagggtacctgatcgatccctaatcccgccttgcctactacggccggggcggtattttctgacgactctggctcgtgcgccgaagccgtgtgggcgtgtcgggtcgtcgcataggtggtgatgctgacccgccgtgaacgccggggttgtgcggtgagatgcgcgagaagtgttgcgcggggtattcgagcggcttgtaagtgcagtcttgagagccgagtggtattcatcatgacgaacacacggtcgtggtgttgtgatttttggggtcgtttgatattttgcgacttggtcgagcgtgctgtctaccgtgtgtgcagtacgttgttgaccagaccatgcatgactgttggatgtgtggatgttcagttcaacattctcgaccgaggattgagaagaaagtggaggtcaaggtggggtggggtggggtgtacggcagggcaggcaagagagcgcgagggagtgagggagtgagggtgacgcgtgagaaagcagggagagtgagagagggaggcagggagacagagacgcgagagtcgatatcgacctcgtcgagaacatagtggctatagtggtcaaggatcacatcagatctgaatcacgaatcgatcggcaacctccccaccacttcatctagatatcaacctcacggaatagcaacctctcaggatgttcttctgtgccagtaagtcgtatcccgtctcgtcacctcgtcaatacggcgaccgaaccccgggatcgacctgacctgacctgaccacgtccgttgtagtctctggatctccacctaccgtaccggtcgtctcgaccaaatcgggccacgtctacgaaaagaacctgatcgagcagtacatcggtgagcagaacagccctcccctcatcttcgccggcctgaacgcttgcgagcaaccggacgagggacggtagatcccggtcctgcaattcgacaagaactgacctggaaatcgctcgctttgtcgtcacgcccgggatagaacaaaatgggaacgacccaatcaccggggaagctctgacaaaggaagatttggtcgatgtgaaagccagcaagtccaacctcctcgccttccccgtcatgctatcccacgtcaactcgacctgaccccaattcccccctccctggttctttcctcgacagaaccccaaaccctgcctccgcgccaggcgacccaatcttccattcccgcgctcctcacttcgctccaatccgagtacgacgggatcatgctcgaatccctcgagatcaaaaaggcgtaccaggccgcccgacaagagttggccaacgcgctctatagggaggatgctggtgtgagggcgttggcgaggatcatcaaggagcgggatgaggctaggaggtgagttcgggtcgccccgggagggtcatccggtcgagggatcgtcgatggagggattgcaggggctgactggttgttccccattctcgtctcgttccgacgtgccatagtgccctggcttccgtccaggcgaccatcgggactcaacctgcttcggcccaacaggggaatgaaggcgacgacgtcgagatgggttctggagaggatacgcagggtcaagcttcggccctgcctaaagaggtcgaggacgtcttggccgagaccaacgccgcgtgagtctttcccccactccaatccggaccttggacgagcttgcgaacaacagctgattcctcaacgtcgaccgacttgccgatcacagcctgtcgtctgtacgaagaaagagaaagcccgcacccgggtacagcaaggcggccgatgtcaagacctacacccagacctcgaccgtgccctcgctgcatagcaccaaacccgtcggaatcaccgcgctcgatttgtccctggatggcaaactggcgttgaccgggggtgcggacaagacggtccaggtgtacgatttcggcacggaaaagacgctcgccacgttaaagggacacaccaagcccgtcaacaaggtcgaattcgtcgacacgcccgatcgaaacatgatcgtatcgagcagtgccgacaagacggtcaaggtctggacggcagagggagagggtgaggatgccaaatggacgttgaacggcaacatgacgggacacaagggggacattgtcggattcgccgtccacccttcgaaacgctacgttgccgtcggatcggccgattcgacctggtccatgcgtgatatcgagacgagctcgattgtcaagacgtactcggccatcccgtcgttcgagggtagcttcaactatagctcgctcgccatgcacccggacggcttgttgtacggcgcagggacggacgatggcaagatcaggatctgggatgctagggacgattccaccttggccggcactttggattcgcacgccaaacccgtcacgacgctctcgtttagcgagaacggttacttcctcgccaccggatccaagcaggaccctacggtcaacatctttgacctccgtaaactgagcatcatctcgaccatcaactttaacccagagggcaaggtcaacgaagtaaggttcgacccttcggcccagttcttgagcgtcgtcgggaccgaggccaaggtgtacgccaacaagtcgtgggaagaggtcttgacgtttgacgacaatgccggggagttgaccgggttgaggtggggcggattgggagaaaagatcgtcctcgccgggctggacaggacgttgagggtgttgagctcgagctcggcatgagacggtggtcgggggaagagcgtgggacgccgcgggaacgcgttgtaacgggcggggggtgacgccattttgtcgtcctcgcggtcgtgttttctggtcttgtttcgtacatgatgatcaactaaagggattcctttcagactttttttaccgagccttgtcctggccgatctgaaacgacggcgtgcctccttttatgtagtttgttgaccccgtttcgtcgtttcaccgtgactcgcctgtcgccgtatgcggcttggaagatttgttcgatacttgctcacatcgaatcgatctttcgaactggtagaccgtctggtccacgtaacaacaccctatccagctcgacgtcctatcatgtcgtccacatcccaacccttgacgcccatggcggtctacatacgcaagacgcagcccatttacctcccgatcgccctcctcttcctggtgttcaccgtcacgtcgggacccaattctgaattctggtggataaagctacagaccaagcagttcggtgagatcaaagtcggtgctctggggatatgtgacgctagagcgtgagtctcggtcgtgcgcgagaaagcactcgaatggagctgaagacgagaaactggtctaggtgcggtgcaacagggttgggatatgctataggcaacgccgctctaggcgagacgatactatccgtaccccccttcctggcatttcacttgttcggtaagtgtgataagatagtgtaacgtagttgtcttgctggctcaataaggcgggctccctccgcgctcgcagtcattgttctctccctggtcatgtggtcggttcacctcttcttcgtctttaatatccacgtcattgtcggccagtatcggcggacaggctggcttgtctggatattccctctcatcatcaccatactagtaggaattgtcctggccggggacaatctcatcttgtctgatctgcgcaaagagacagcgatcgaggaggtacacactatgggtagtttctggatgtaaatttgaaggggtgtgatacagcgagtgacgactgacatgactgctttgaccgtaggaccattcctgcctttatatcgtcattcatctggttcttcctctcgtgggatctccatcgactggccaagatatccaccaatccaaacctcgccgcgaagaaggccgctatcgaggacgcacttcatagtcgccggcaacgtaaaacagagccggcagagaccgggggttggggaatcttgagacctgcacaaactgctcagtcaaacgcgcccggggcaacactcggaggttggggcatgtctagcttcccctggggtgcacaggagtcaaagcctgccgatggcatgtatcgagaatctgcaccggcagcctctttgctaggatccatgtggccaggccgcatagcacatgcggtcgtgtaagatcttggtcaatgatatgtgctcgcgccggttgacgaggcggtaactcattcatgattacgaagatcgtctccttctctttccccattggtagttcggctcatcggcgactgggccgtcctcgctaagggtttccgaaagacccctgcatgacccttgacaagcacgccgaccgtactgtttcgacgatcttactcgcttctcttgctatgcgtgccaaaacaactccaggcagcctcgcagctaactgagaactattagagttcgggttacaaaataccggcctgaacgatccgatcgagtgtcgcgcccgatcgcgctaaactgctgcacagcctgcccccgtccgcttccggtgtttcagatcgtctcatctgatcgcatcgcccattggtcatcgtccgaccgaccgacgatcagtcctttccggctactccacacgagtcgtctttgttgttgttgttgtgattgagattgtggttggagctcgggccgcgctgtagatttcggccatagagcgagcccgaaaattaggcaatccggacgagaggaggatcagtccgagacaccagatccccccgtgtttattggtcgtttgcggcttgatccgaatagaagaagcttgcacgtagcgatcaacgaggatttacatcgcttccgggccggcttcatgaggtcattcgcgatcagactctctcaacgacaagtaattgggatcgcccgaaatttcgagcgatcgatgacatagcttgtggttgcctgcatccagtgttcactccgtctccgggatgcctggcgactccagagatcatccttgactcgattaatgccgcagaatcttacctcgaaccccacgcatgactctatcaccccactctgaggactgagcttgatgttgattcgtcgaagaacttctcaaccacgaatctcgtacgctcggtcccccggacggattattccaaagtacacgcctgatgatctgatgatcagtaaacgcggcgaaacaagcaaaacacggttaaacaacgcattcttcgggcccccatcaaacagacggcagatcaaaatacctttgaggatatcaccgagacccaccaaacctgtgcaaacttctcccgatgtgaaggcaaaagaatgaattccgacaagagctcgctcgcttgttagctcgcggtgacctcagatgatgtcgacgtcaaaggtagggactcgagcctattggatgtgtataagtcgattttatggtctaacgataaatggtgactactcgacttgacgggatgattggactaggcatgtccgccctgctgagcctgtgccagcatacgattgcatccaaacgcaactatatagactgccgaagagggatgcgatggccctcttgcgttcaatcaatctatcgtgaagagcagcacaataccgaccagcaagaaacgtaccaataggaacccttgtcaggcactcgaactgcctcgtcgtaaaacttgttcacataccttgatcaatttacagcttgaggccttttttgaatcgagcttgtgtaccgtctttcctcaccttgatcatgaccgatcgagctgacacgggaccggcggacccggatcaacattacagttacaatcagcttacggtatggaacgtcgaaggaatgcctaggttcgatacgcctgccacacgaccgtcgtatgtggcaagcactttctgctgggacgggccgactcggaagctgatctcgcgcatcgcgttacggtctagatacaacttgccactcgctaacgccctcattgaattcgacccgttctactctccgccggcccaggacacaaaggccgatgcccaaggagctgtggctcccatagtcaatcttcctccccctagaccagcgtcgacacagcgcgcaaagctcttcccagtcaacaagggtgacgacaaagtcaaaggcttcactcgccctcgcgggtcgctcgcattagaacaaccgaagtttcagatcccgcccacactcttacaggacaaggacatgtacgccgtccttccagtgcatctacgcggtccgactcagcaggaggtcccggtccaaggcgggttcaatgcaatgatgcaagctctcgaccaaaccaggaaggaactcgtcacacaagccaaatccgtcccgagccctgcggatatcgacgcgaaacacccggtacccgcgccagatctaccggtcaccccggtcaaacaggtgtctcaattcggtgctaccacatcaaaagtcgcaaccccgcagagagattggatcggtagctcccctgagatgctccccgttccttccgctcagccactcagcttcgtcacccctaagaccgagcggaacttgccccctcggatgcaacttcctgacaccccagagtctccgctcgccaagaaatcgttgcgcgaagacaacttgcaatatgacaacgcggcagaagtgatgaagcagactttggaaggtaagggtgttcccgctggatctacgaaatatctcttggtcagtatcgccgtgctacgtattcgcctctttctttggctcatcctagaatcatggggccgttctagatcactggtgtcagtaagaccttggatcctgttatcatgagagaacgaattgccgtaagttttcctcctcgacaaaaggatttttctcatcgcactaatgatcggcacagagaatcgccgatgtgaaagctctggttcatcgttaccaaggacctcttggcgcggtgagttcgagactttccggatgccgacaagggcgtgacactcaacggtctgacatcatgtccgcagatcgtcgtcttgctgcacagtaccaaagacgcctccaaggtggacgctgccatatcgaggggcgaactcgatctcgagtcgcaggcaaaggcctcgaggttcaatctaggcctcagggctgtcgacgcggatcagtctaaccgagcgtgggaggcggtttgctacggaatagctgcaggcgcagtgctacaggtgcatgagttcagtagagatattatcgagtcaagctgactggtccgttatcgccaatcttgcagtttgctggtaaagcagtcatgaaatatatcaatgactgtgaagcttgcctcagaatcactctcaagacaggaggcgccgaagggtccgcccagtttcttcaggtaagccgggaagactgtcaattgaaggatggttcggctcagagatctccattcggagcagaccctactcgaagaagtcggacccctaaggctgttcgtgccagaccaagcgaacacgcatgtaagcagctcaccatatcagtcgaaaataagtcatctcgtctaaccttgtcctcttacgcagacattcttaactagcttcgatgacattcgcgacaaccgatttgtctctgaacaattgtccagtctggccctggaaggatacacattcgctgtttcggaatatcctaccgctcgatccgacagcctggtacagacatctaaaccagtctctcagttcatcgcaccgatgacgccgcccgactcgggtcgaaaacgtttgactgcattgccttcccctgctcaagcagccgaatcaaattcgccaactccgtggaggccttctttcaaacccgtacttccggtcacgccaccccgcaacgttgccctagagcggatgttacaggattcaacaccccgcacggatttgttgtcggcgatccgcaaagaacgcagcaagtgggacatgtacgagcgtgctctcatatctactccgctttcgcgaaacactttgcagctcttccggactgcgcaagatggtatcgcttcttcaggtagtccgccgacacaagtccctcttccagcctcaaaacttgtctccttcaattcgatgaaatcgccgaacaacgtaaaagttagagactggtttgcggccggactgaagggcgaaaaagggcaggactctatacgttacaagcaggaggtccctcaagaatatcgattctccttggagcgacttcagagaggtgagctttatttgcgcggtccagcctcattcacgttcttatgtattttcctaaggtttggacacccgtaccaccgtcatgatcaaagagtgagtctcctttttgcttgattgaagagtggaacgagctaatcgggcgcgatcggtgtttcagcattccggtgactagctatatacttgcccaatgtccgagtgcaattgacaccccgtgtgtgtttatgcttgccagaataagctgacccgtaatcagttgattgaggccatacaagaggttggtagagcccgcttatgctgtacgaagttttattcatccacccttgctcttcaggtagtacctggaggcatcacgttcgtgtacttgcgattcgactgggagtttcagtgcaacgtcgcgtgcgtcggcacggtcttcctgccagactttctcttacgcttaaacatcgcatctgcaggtatgggttcgtcaacttccgcacgctcaatcatctggaagcgtttgcgagacatcgactgggccagaaatggggtttatacatgagtgataaagtgttgcaggtgaggtcgtcactcgaccgatttactaatgcgattgctgacacgaccatttcttctagatgtcatacgccacgattcagtgagccaaggagtgtacgaacgtggccttcccctttaccgacatttactgtcgctgcatagaggacacgatatgctagtcaaccatttccggtaagccttacgaccttcctaccaatcggtccgatggctgagactcgctggcattggcatgatagcaattcgaccgtaatgcatgcgacgccggaatggcgtcccgtagtaatcaacaccgctggaaatattgatcactttcctcctgtaagtttcttggatcgctggcaaggtactcgagacgctcatatcacgcatatattatagcccaaccgagaagcaaacgggcaatacggatttcagaacggtcaacgtcccaaccgcgagacttatgagtgggaagaaaccgatccacatacgctctaaggtttgcgctctcgcttgtcataggaggcgtatgctgagtagagtggaggcaaagtacagcaacaaattgtcataaggtcgttgaatacatgttgggaagcgttacaatgcgtgtcatgtgtgctctcgcgaagtcgtgttggcaatcgtttcgtcatgcaagcccgaagtggcccgctccctccgagatcgcggtcagaagcttgtgcctcaggtcctcgtagctcgggtaagacggtaagagcaactcgttgaagcaagtggccgcgctgggtaggacgttctctcgatacagctgagacacgccaggagatgttagctatttccgatctcgatctgcgaactcggagcattctcactttgtgaatttggaaaggctggataccagagctaccttgcagctgcgtgaagcctcccagcggtactctcgatgaagaagtgacaaacatcaagaatttcgccttctcctcttgcgaaaagcttcgaagagctcgccagaaccaagtgacttcagcatcggtatgtttccagccgtgaagtcttttgaagcaagctcaatttagaatccatctgcgataaagcaaccgcagcgggactcactgagtcgcgttcttgagctcgtcaacatcgatttgagaaactccagaaatcaaaactgattgaaggaaaatcagatgatgcaagcctgttatcgaataagaaaataacaagctcacgttcgagttgatccggatcgaagactgatatgagcttgcgggggataattctgcaaccggtcgtcccaggccgaaatattgagtactgcgccgggtcgacgcacaaatgatttactcactcgtagaacccgccgaggaatgccttggcctgcttttggatcgatgtctccaaccgatgttcgaccaccaagcggacatactcgcctttgttatcttcggtgacgggtatgctcgatccaccttccttcaggtcgattaccttcttggctccaaactcttcagtttcgagcgagaagtccagctgtgagagggctgtcagataggtgatctaaaatccgccttttactggatctcacctcgatgatgccggtgatgtcgttgttcagcatccagacaagcgatttgtgatacctatatgtacaggacgcttcaagtaaatcgcgtttgtgccgacggagataaggacacttactcgggatcaacgctctccaggtcccgaacgtcaactttgcggcccaggatctgcttgtagaacgctcggctgaagtaggcgtccagcagacgttggctaagaagagagcggggtgcccaggagatcagcatgagccaagcatggaagcgtgcaggtcagtctcactcataaatcgccttgctgtcgagacagagaaacgggccatcagtgtaaatcgggagacaacattcttcaaatagacttacgcgatgatttttccgatgaagcggaagtagtccaaatgatctccgttgctgatttcatacgaggaaagagatcattagttcgcggacctcacctcaccgtgccaaacgtgcttacacccaagagtgttgagaaagctggtacgttccctcatcggcagcgcacggttcgaaaagacctgcatgacaagcgattgtcaaagggattctacaacccaggcatccacgatttggacttacagtaacctgggttaaagatcgattgggcaagtgcgctgtaccattctcgagtgacacccccagcatcgactccctcttctccagagaacttgatgttcagcttgccgtacttcaaggtatcgccagatttgttcagcagcgctctgtaagaatcctcgaagatgtgctctcggcggatgttaaggtgtagctgtcctccgacgtcccggttgggcttcttgcggagctgctgcatgaaccagttcctcttattatcgaattcgagaactcgagggttgaggatgagcagcgagaaggagccgctcatcagagatgggttgttgcggaccatggtgttcagaactttgcggtgacggctagtgaacaccacaaaggagtcttcctctggcgcctcacgaggactcattggtgaaagagcaaccgatccgcctcgagtgcgggatgccgcagccttagcgctaccatatttgctgacgaccatgagagattcgaccagcgggagcagcacggtcgcaatattgatgagcgagtcttttctctccactacacttaggcaatcgcctaaagtatcccagagcggggcaaagtgcaacgattcgaatatgctttcgagacgttcttcctcgacgtccaaagacttcgtgccctctgcgatcgcagtaacgaccgatgcgtcccaagtagcgtgattgtggccgtctttcggagcgtagatgtagtcgattgtctttaagacccgaagcagcttggtctgagccgatgaagcaggactgaacttgccgactgacacctctcggtcagtgtctgccttttccgcgtccatgaggtcacggtgaagttgtttgagatcctcgctcaggacatctccaagacgctgagcttgatcttgcagctgcgtcgagatgatctccttggcagaggggatatgagtcaagttctgtatcaggctcaatgtactggaaaatgtcctgctcgaacattctccaaaggtcagaacattaggcacaagcttgagaatatcgtccgcgatgtttggaggtgatttgagcaacgtggtaggctcgtctgcgccatcgccggcgagatttccacgttgatcatccgaagtttcagcctctcttgcctcgggaaccgttgtcgcagcggaagtctcttgctctacgaccgtgtccgcgacggaagtggacgccgtttcagtcgtagtgagcacgggttgtactgctgaagactgatcggtggatgattccacaggctcgcttgcaatcagctgtaccaagggcttcgtcaatgtggccagcaaggccgttagcgtttcggccattcctggggaacggaaaaggctctggcgatcgagcaatttgagtaaagtggagattgggaaagctgacgccgtctgcttctctctgcttttgcccttcttcgtcgatttcgcgctgactacgggcatgtcctgctccgtcaagaagtaaagaaggacgagctcgttgttggtggcgatgtgagagagcgcctcgaaggcacgttgggctacaaatgtaggtatactgtcgctctgtagcccagccagcattgctgctgatgacgtcgtagtctccgcagcccccttctttttcggagtcgcctttggagtggtcagagcacctttcgatgctttcgccgcagactgcttatccacgtagctgagatcgccagaatcatcttgtaagacgctaagcaatatgctaatgacatcgcttcggcttttggtgttttcgcaaagattgccaagcactttgaggagacggtccttcttgttgatctctgggaagaagaggagcctcaccagtgcagcgataccggacttatccaagagctgaattgtctccctgggtgctttcttttgctgagaagcgccgtgtcctcggtcctgcgcgccgtgcacgtgcgctcgattgcggaacccacctgttgccgagcgattcagttcgtcctgaaggccttgagcgttaccggcactgccgctggtcagaccgacaagtccgttacgtagatgaggcggaagagcagcgaagaatgcgtcttcttgctgcatcatgaccatggagcgcattgtcgggtctagcgtcgataagaaattttgaaggtctccgatgtccggcaatcctcccatgagctgcgccgccggattagcagaaccctgtccagcgccagttcttgactctgcatttcgcctcgctgcctcgatggcctcctgctggatgacttcagcccgtatctcgggaggtagggcgtcgaggaactcgggactgatttcagtggacacggaaggttgagcttgtggttcagtcgcccggttctcgcgaagatgctgtgacaccacatctgcacgcatatcctccggcaatgcttccaaaaactcggggtcgatgccagtgtcggttatatcgacttcagcgccgtgaatcatgacagtgaccctgacggtcggagtttgctctgcgggctccgtcgctaaacgtaaagaccaattagtctgcagccgtagcgggagtgccatcgtgatacgcaccgatacccatctccacatcctgcggctgactttcctcttggttcgtcggctcctcagcacgacgttcccgctcttcagcttcttgctgcacccgttgtcgctccgcttcggcttcttgctcgaccttttcttcagcctccttcctcagtctggcttcagtctctcgcttgacttcctctagccgctcgtcaagctttttctgagcttccctggcggcgggaagaagagcattaacgatccatccggtcaggttttgcaaacgagatcccgtgtcgtatgaactcatcagcgcttcctcctcttgccatcgattaacggttggcagaggaatcgaggagaacgcttcgacgtcaactgcggccgcttcgcgcgcgcgtcgcgaagacgcgaagcgatggccgtccccgacttgaatgtcgacggcacctccggtacgaccaccttcgcgatactcgatgcgaacaacttccggcgctctgccgccaagctgatcgagcagggtctccagcgttctagagccgtcatgactggcgccggtcagctgttcgatagactgcagtatctcacccagagcaccgcccgggtaatgacggtgtggacggcttcgatgcggctggaccgcgcttggcgctccttcctgctgtagcaatggatgagaagtcactgaagccaccggcgcctggggaggatgtgaacggtggaacggtccaatgtcttctgcaaacacagtcatgttgaggtcagcggttcggtcgttgcgtgtctcgatctagacgccgaaggactcacccataagactcatcgtgttctgcagagatcgatggttgcggtgttgctgctgcgtatcttctcgagactgagttctcacaggctgtccccatccccaattcagtgtcggcccgttgttcgcgttagcgctgagtgggtcgacgaccacagtgtctaaggcgtcgagttcctcttcgtcgtaatcgctactactgggaaaaagaattaggcagtcttcgaagaattttctgcaatcaagcatagtttacctctcggattgctcatcttcctccatctcgtcttcgagatagacttcgtctcccgcatacccttcagctatcacgaagaagtggtaagtttgggcctaaattacaaagcccacaagagcttaccgtcttcctgatcaatgagatcgaccgcatcatcgtcgaacatgccatattggtcatcgtgaccatgctctgcgttctcatcgtcttccgggaactcgtcctcgcccgaaatatgctcatcatcttccatgtgggcgtcctatgataccaaggtagggctgatcaaaaaagagactccgaaatggagcggcggctctagggggcaacgcacccagtgttccagctcttcgtcagacccagagtctgatggctcagtcccattttcgctttcatcatcctatggcaacaacgtaagattgcgggcagcatcgggaggataggattacaggcttaccatgccttcaacttcctcatagtgctgtatcgagaatagctcatgagaagcgttgtggtaaagtgcttgtaaatatgtgcttacgtcgaggtcgtcttcttcgtcgtcttctcccataccgtcagagtcttccaggtaatcgtccatctcgccgccgaacctacataacaattgtaaatcagctttgcccaggacttcgcaagcactaggctacccacatgcccaaggacgaattcctgtacatgtctggcgcgtcggtggaggcgtcatcgtcttccatgtcttcgtcttcgctttcactgccgctactcatgctttcatcttcagagatttcttcatcagtcggcttggctctgtcaggtcgagccattttcatggagatcttggtcctgttcgatgttacggtgatagaaaattagagaaggaggctatcgcgacctccagctgcggcccacttacaagtattcgagcggctgaacaatcgctgtgatcagattcttaacttgaggataggtcaaatctatctcggccatagcggtggtgagtataggaacaaagcccttctccagcatgatcttcgcgacgtgtagagatgaatcatcttggtgcttgggttggactgtcggacgtgctgtcaacagcctatagcagagctcgctaagcgcccagagtcgtccatatcgaatgttgaggggatctgtcgcggtactaatttccttgatggatttggcgatggtgtccataactgttttgcgaatggcgacgatgggtgaagacgcgtctttgagagcattgcttccgctagcatcggaacaaagcgcaacgatgaccgctccggcccaattcgacacgttcattctagccttttgcgcatcggtaaccttgtcgccgcttgctcgtgtcacatcagcatcgaagacgatgttgcaaacgtaattgttcagcaggatctgcaacaccggatatcgcatcttgttcgcgctgctggcgtctttcccggtctttctgctaggttgtaccatggatattttgctttcgttgtatgaacccaagagttctgtcaaaaccagaagtatcgccgaaagttggttttcggatgactgcttcggttccgaagatggtatttcgccgtcgacttgtgatccttgcgtcttgtgaatcgcgaatatctcgttgattaggtatgtcatgacttgctcgagcggcgacccggctgaggtggtaggctccgccgaggcctggaatgggtcatcgacctgcatggctgccgtctccggaacctgctcgctcgtcgactcggtctggattgatgaatcctgcgactcctgaaccttctttttcatcgcgatttgatgaccaccgcctctcggctccggctccaggagttcgcaatcagcggtagcgaccttgaggaagacagctgggtcacgcaatgcgacagcacgcagatttgatacgaaatgtttcgcgctcacgggtgcgttcctaggtcgagcgaaccattgatgaacttcgcgttcgatacacgttcgcagaacagattcgtcttcgatcagatgacggcagatgatcgttgcaaatgccatggccgagtgccgacgcttcgcgggagtcgcaaggacggcctggaagaggccaggaagtccagagttctctaggaaaaattgacatgaaggcttatcccgcgtcaagaatacgagggtgcgcaaaacagccagtaactcgtcctcgtttagatcgtgctgaagcaagagctgggtggcatagtggagggtgtctcgacgagcttgttcgtacgtagggcctgtcgtgatctccgactccatagcggattcctctgtaggcggcgtcctgattgtctctccccacatcaagagacagtcgacagccaacagccttgcagacacccagggcggacgaggactctcgactacatccggcaaactccgtagagattccatgacttgtgtcgacttctcgggtgagactttggcaccaaaaacaggctgatgagcgattactgcaaagagccgtagtcgcgcttgaagcttgacatctcttgctggatcctccagcgacaacgtttggacagcatccatgaccgagaaaatcgacgccacgtcctcgagcaaggcttgagcaaactcgaaaacgagatcgttatgcgcttcaacgagctgaatagcgcgagccgaaagatccttgcggtatagcttccttttctgttcgagatgtgcctttcgcccctctgcaatagctttggctgccactatgcgagatgtcgaggctggcgtgatgctttgctcggtcgtaggttcaaccgactgtgctgatacgtcgattccgaccatttcattcgcttcagtgaccattgctgcgcccgcatcgtgtccttgtgcatcggcggcggacgtgatttcgctcgcgggaaccgcggcaagctgacgatggtgctgtacaacgtagtaggcagccgaggggaaaacgttgttagttcgctgtaacgaaatttcagcagccccacgagtgaagcccatttgaacaagcatgtcgacgtatgtcggatcgggtcgcaccgaggtagcgggcgcgccagtattggctcgagaagtggggaaaccaagcgctgcaagcgtggaactcaaagaaccagtgttcgaggtaggtggagcaattccgactgaggtcgagggaacagcgagtggttcgatcaagtgcaaggccgcttttgtaatggttcgaacaatggtcgaagggcattggtcaagccaaggggcgctgaaggcttgccatataggatcggcaaggtcgagccgaatcttgacgaggaattcgatcggcgagaagtaatcgtcttgatcgggtgccttgtccttggtcgtcagaatggtcgtttgaggcgactcgagcaaaggaactgctgagacgagtgtcctgacaagatcaaagatgaccttgagaccagccaatacccgcaataaagctgctttgtctgtcttgaagaccggggtatcgaccaaggcgttcgaaccgagcgcggtcagctgacccgccaggagctggctgattgcagcgattccgcccttcttctggaaggcaatgagcagcatggtctgcatgctgacggtagctgtccaaccttcgtacaacatggctgagacgatagttatgatcgcacccttgcctgcgatgttgaggatgtcgtattccgagccagacacgtgattgaggtggtcgacgagcatagtagccatgttgtcagccgtcggaacggaatgtacacgatgggtgggttcgatccttcggaacagcaacattttgatgactccctggaagaaagttgtcaaatggagggggattcgcgagaacaggtacttgagggagatataattctccggtaggactgtggtgttgccaggcataggagtggacgtatcgccagcttggtcgacagcttgggcgggactctcagtcggagaaatcagggccgccgccaggtcgctcgaactatactcgacagctggagacaagaggttttcctcgactgttctaagctgggtgatagcttgcggggctggccgcgtaggcgactgcttcactttcaaccagatgttttgccagatggcagcacggtgcagcttgcccatatcagtaatcagggtagaggaatctgctgctccgagcgctatcaagaaggcggtcgctaccttgccgtgagcgaatccgacagtcgagtagagactactcaaaaggccgagcagattgttcaagctgaccatcctacggaacacctcgttggccttttccagctggtcaagggattccgggtgcaataaacgagtggtgacagccgtatcaacaccattggcatgccattccagtgcgggattgtccaccattgcggccttgaccgaattcacgatgccttccaggaccttggtgaggtcggcttcggcgagatttcggaagacttcttgcatgtggtttgccgtttctgttgttgagaattggctcacgaggcacggcatttgatacaggtcaaggaccaattcaaggcccccctgcgcgaggaaatctttcgcaaggtgcgggttgtggaacaagcctgacataagctgtgcagcaatagtttcagccattagggctgcgacagtgcgtgcggagatgaaaacatgatacttacttgactgctcagccataggacgacatccatgtgctgctccacatcttcgtcagaggcggacgcctcaaaatctccttgtgattcaggtttggtttcgtttgctccgctttgagcgctatctaaaatcaaacggtaatcggcaatcttgttgacgcctgcccaacgagccttctgtcccatcgctttcagagatcgcagcatctcgaacaaagcctcatgcaaaacagctttgagcggcgtgtgatgccgagccagctcatccaagctggatcccaggtaagcggcattgtcgcgctccttgaggacgtcccggtaggctgggttggtcggcgaattgaccaacaggtggatgagttgcggcctgctcagcacaaagtccatcccagcttgattgaggcagagcgcgcccaacgcatacggaatcgtggagataacctacgcagccggaggtgttagcgagcgcaacaagctagacagcgagatgaatactgacttcgtaagatgggtacttgttgttctcgagcgcgtcatacattgcctccggcagcttcatctcctgaatgataggcagggatgtcggttcattgtgcacaaaagtcgcagtgatattgatagctgagaagcaagaaccgtcagcaggatatttgggtctaccaactacatttagctcaccgatagccaaaaccggagctcctaatttgttggcattctgcagagtcctcaagagggacttgggcaattccgaatcgataaggttacggagaccttcagcagttcctccagactgcatgaggcgatgtatagaacggaacatcaatttgagcggcactgtccgtctaagaagttccgattctaacatagggagggagcaaatacgcataagcgcgatcgctgtttcgatcacatcgtggtgaacttacctgtgatgctctcctccatagctgaaggtagcagccatttatcgagctcgacctagcgatcgatcaatagcggtcagtggggagatccagagcgtaatgcggctcagaagggcgtacagtaatccgagagttcaagacttcgaggcctcctgcattgcagaataggccgaagacgtttgggtttgtgtagatgatggtatccatcaatccgatggctcgggcgacatactggacacagtgagtcagttgcttgtccaaatcggtagaaatatgaaattgacttacacccccgtgactcgaattgttgtccttgataagttcgatcagggttgggataactccagccccaatcagcatccctccgtgcgtgggcgagaccactgctagcgagaaaaatgcgagcgtggcatcaactagaggatatggcacatctgtagaatgacacattatttagcgatgcagccatgacactcgtaccgacgcgctgctgaccttcgttggtgctcagacgcttgatgagatctcggaagaaggtcatcaagataccatgcgcaacattagcattcaaggagctgaatacctcggtcactttagttcgatatctgaggcaagcgtcgtcgaccagcagagcagcggtcacgatgggatctccaacacgggaactgggctgaacaatttctgccaattgcccaataatggtaggttcgtgcaagaaaagctcggtctgagcaacgtcttcgttgacgacgtgaactgtgtactttccatcagtcacttgtacggaaaataggtagtctagcaagagaaacttactgtaaatcgacatggcagtcagacggatggcgagcaattgagcgatacgctgcctcctttcgtaagatagcttgccatcaggcgcagcaacggacatcatacattcgagccggctcagtatttcgaaatgaacatccttcatatcgcttccttgcagctcaggatgctccttcaacagctcagcaagaacctggtggggcgtccatttcccactcctggctaggtccgcgaaagcgccactgaagagggacagctttgtaagtccatcttggttcgtgaaagcgtgcgaccatggcgtctttgtgacggtgccgacgccaggagagctaggagcctgcgatgcttgtggcgtagaaggctcagcaccagccaatgaagcgactcgccccttttgagcggtgttcgagccgctgggctgcttggtcggagtttggaacacgttgccgcctccgattgccttgtccgccgctgggggcgatgtcagcctctgttcttgcgaacctagtcgtaattctgacgtcggctgtagcaactccttagtatcaggaggagccgatacgttctgaagatctcctgaagcagagatttgcgaaggccgatagaattgagcttgaatatggaaaaaggtatccggaaggttgatcacggcatccgtctctttcgacccgcccctcttgtcgacggcttgagccagctgaagcaggccccacccgttttctttcagacggccccaagctcctcctgcggtcgtcaacatgagaagcctgccttgaatagtagcattctcgttcaactcgaagctggttacattcgagtattgctgagctggtcggtgcagcagagcaaggacggcttgcagtacgtcgaggtcgctggtagacatcaattcgcacagtctctgtagaattccgatggcatcgaagatgagctcccgccaacagacattatgacccgtggctggcggtcaggaaatgctactcacgtcataactcgcaaaaatcttcctgctcgtagcgttgtccatgaccaatttctccacccgcagaatctccagaagcagttgcttgtcatcctcggagaattcctcagtttgcacagtgtcgaccttgtactgttcaatctttgcttcgtaaatggcatcaaacttgtccagcacgggaatccagtgatgcatgtcaccacgaggatattgccacggcgtgttgtgcggtaggagctccttgagctgaatttgaagcttgtcatcttcacagtccttgattttgttgatgagaccagccagatcggggtgctatcggacagaagagtcgggaatcaaagcgatcagcaatgtgaggcaaatggaaaggtttccaagattgtcggcgggacttaccaaggccccggcctttttggtattaagtctttttaccttcatggtagcatctcaagtctaccagaatataagtcttgtcgattgtcgagatgtttcgttggagaaaggtaacagacctgggtcatgtcatgtaaatgaaatgccggtacaggtccatcgagggatcatgcttgcgaggtatgaatgggtgacgagtcgcggacaagatacggttcttgatctccgcttatctcgcagcgatcaatttcgtaatggtctctgacagtctggattcaacaagtaatggtcactctatatgggaaacttcatcatcgtcatgtcgtatatcgtcatttaagaatcatgtcggtgtggaaaggcttagatcacaatctgatcgcgtcattggtggggccgacggatccccaagcgatgcagtaatgctcgagcatcaattccagttcttcgacctcgtccagcatttctagtttggagatcctatgcgagcgtcaggattgcgagtagtttcaatgagtgcctccttcagacgggtcgggtttgcgacgacagcagatatagacttaccggtcgagctcatcctggggaatgttgcgatgcctgatgtccttcaagctgaccccctctaccgtatcgaatccagcacttaggaagcgttcggcctgagctcggggacttgcgaagacagcaccaggaagctggatatcgcgggcctatgatcgatcgtatcgaggcgattcagctagattcgctagatatatctcccaatagcatattgactgacttgtaggttccgccgcattaccaaaccgaatgcgtcgctgccaccgaataaagcattagaacctcttcactattaaatcagtagtactcgtaaacgactcactctagcccacacatttcgtacaagatccctgtgcaccctccccgcttgccgaacttggtcgcgaaccactcgatcacatgtcgactctcctccggctgcatgtagcagtacacacattctgccaagaacagcgttgataattccggatccagtagcctcgaaagcgtctcgtccatcgaaccaggttgattgttccctttgtctccgtcccccttgatcctcagatccaaaggtaatagcgtatagagcggtgtgtccagccgagaccctccctgagacacctgaggcttggtatgtgtcgttccttgtgagggcggggaagcgatccctgccgaaagagtcttattcatgcatatccggcgagctttgatgctcgtgacatcgtcaaaatcaatttctacgtatttcgagatgtccggtcgttgtggtcgggcctatgacaatgtcgtgatcgggggaatcgattagtcgagataacaaaccgatatacctctaagcgacgtaccatcaacctccagaatctcgtatcgcttccagcgcccaggctaacgatctgtttgggcttttccttgtctcccgactcaaggaaggagtcgaccaatctgtccagagcccatgttcgatgatgcgtgccgacgttgatcaaaggaactcggcgaatcgtcgaggacgatggtgctttggcgatgagactggcaaaagggtcgtgcaggtaccccgcgttgacggcggatctgttggcgcaagagcgagtcaggatgggaacgacctttaagcggctgttagaggtcaaagcggattatgcaacgctcacatgcgactgatcaaggcatctccgtctgtcgctcggatggcctggtccgctcgagccccctgacccggctgctgcgtgtcctgttcaaagcgccttgggatcatgacgggtcggatttcggaggagcaggatgttcatgaaaaggacctagtcctacaacgctatggctcccggaatgcgatttgagtgaacaagtgcaattcggccgaggtgatgatggaaccgacttttgttgggcctcacgcctagttgacctacaccgggccgacagtggacggggatcgttgcaccaagccgatgccgagagagagccgacgcgacccccgaggttcggtcccgagaccgcgatgcgttgtagtacccagggcgcggcaataacggcggaaggctcatcgcgggcttcaacgagaacaggatggatacccggtccaagaagagggcacggggaaacaacacagaccaaaactaacatagatttgcggaaggggtgatcgcccggcgatcagactccgcgacaccagatggatcctgctcaaacggcaatgtccccgtcgttagcaatcaatggccgtgtacgccgtgtggccgtgggcgtgtgttactccttcaagccgactgatttttatatattgaaccgatccagagccgggcagcaggtctgttcgttgatgcctgtgttcgcgaaggaggacataatcaagctctcgcgaggacaaaggtgcaacatcattactgtcaaaggactactattgtagccgcttcgcacccttattcgaacaaaatcagactactacaaagctcgaaaccctagtcgggatggatacggatctcacgcctgttcattctcaccacgacttggacaatacctcatcgcaggaaagccgcgatatcgaaaaggcaggacgaaagcactccgggatgtctcgcagcgttgacgaccacgatgagacggcgacggcggctcacgaaaacagtgatgtggccggaccaactgcggccgtcttttcacctgggtctagcaacaaacctaggaagttttcccatggttgtaagtagaaagggctcgagtattcgctacgtaagtgtgtggctaatctatcgaaccgaatcttgatatcagtcttcgatcctgaagtggtaagtctgccttgtcagaatctcgcctgcaccgataatgaagattgactttcgttgatctaggccggcatgcgtaaagccgtcatcaaggtcatgatcatttacactgtactcattgtgctcgcaatgtgggccaccctgatcgccttctggggatcgttctaccatgcctccgacagaagcaaccggttatcgatcgcggtcatcgacctggacacaccttcttcctcgggattgtcaacgacactaccgacgttgggtcaatatataacgcaggcctgtcttgccaacgccaacgggtctcccacgggagggaaccaccgaggtactcttggtttctgggaggcagacgcctcgaaatatccggatatggctagtatcgagcgagcggtcgtgcaagaagaattctgggctgccgtcgtcatccccgcgggtacgacttcaggattgctgcaagccagagagaacggagatacggcttgggcgccgacgaactcggtgatctacgtctacaaccaggccaggaatgagaatgccgcggggagttatatcgtgcctatcggacaggccgtcttgaaccgagccacctcggcatggggagcacgaagtgcaggacaatagtaagcaatcaccagccgcctcagtcgcacttgttgaaatcccgctgaagaatcctggacgtcgttgcacatgacagtctcgggacgatcgctgggaatcagaccgcgttgcaagccctgatcgctgcgcctcagacgctatcccccggcgtctcgtatcgaaccgaaaatctgaggagctttgcgacggcgcccaccgctacagctgcgacgtgtgtagattcggttgagaaggccttagtgctccgactgacctccgcggtatcttttttggcctcagtcttgtcgggggaatcttcaccattgtcgtacgttctttggaacaggccggtatgcatattctctaagctgaccccgcatcgtctgacttgtagttcgccttcttgttgaccatggcgttcagtgccggtcgagggatcatcggaccattcttacggaccaagcagtatatcgctatgcgacttatcgtcccatcaatctgctacgtgtttgtctcgctatcgatcgcgatggtaggtagtgttcggatccgaagggtatcctgtatctcggctgacagatcgtccctcggcagcttaatttgccttacaaggttccgttcgacgcccatttcagctacgggaccgggttctttgtctggtggatggcgtgtctttgtgctgtgagtcagctatcgattcaggctagtacgcagaatcttttgctgaattcgtgcgtcttccctcgtacagatgttgggtgagcctttcagagcgtcctgaactcacagagagacgcaaaaaactgattcgggcctgactttttgatctgcgacagcctgtggattcgcactagagttctggatgacaatccttggcccccggttcaccgcctttgcgatgctgttcatcatcatctatcaagtctcgacagtgtcgctaccgatcgagcttcaaatctcgttctaccactatggtatcggcgtcccactcaatcgtactgccaatattcttcggacgctcatctttgataccaaggatgagatcggtcttggtttcggcgtcttgctcgcctggtgggtactcagtgccttcatcaccgttcctctcatcacctggatctaccgaagaaaggacttgaaggcgtaccacaaggagcaggaagcagcaggctctccggcagcttgatgtacggggataatctgacaataatattaaacgccgactgtataatcaaatagaacagagatgtaatgctttccaaaagatataatgatcagatcgaatcttatcgaaacaaatatcccttcgccccggtcggccatagtggatcacagccgacaatgaccgagccaaagtcacgtgaaaatagaaaaacgcgggcacctgtacaccattcacctccgggcctgctgttacagtctcggattatcctatgatttaggacctcgagttcactgggtgcacctgcgaaagtcagtaaagcttgacttgaatctggcgagatgtccgaatctaccacatcggagagtggccactcggcctttcggaccagtgagaaatactttaagtcgcgagcacctcaccccgagatcgcatctggtcttattcgacggagactgaaaaaagggcgggaccctacacagtcctaccctcttttccaggggcagggagtgcttgatctatcaagaccatccaaagaggggaaagaagacgaagtgagacgagctggatggaaatccgaggacgacccgctggcaggtcggccagcgaggcagatcaaggttcacaagcccgtcggtcagggtgtggaaacaatagctggttatattgtgggagatggtgagtccagattggcctcgtttaatattaacggaggattcttatcgagctgcgcctccaggtctgattcttgtgcccagatatctgaacgaatccgagcaactcgtacttctccggtcctcgctgaacgagtatactcgtccaccgagcccactcagcctgtcgacgcattatgtcctgcccaaagcggatcaaccctcattattcgatctttatacatccgaccccgaagctctggttccatcgatagcttcgacgttactggccgctgattcgccagagccctcgccgactccatcaagctcgagcgcggtcaagcgtcaattgatacaaaacgaagcggccgccgaggaggggtacgagagcatcgtcgatcgggtatccgagtggaaaggagacaagccatcgatgaaactcaagagcaagacggtgcggaagctggtagagaccgaattaaggtgggccaatttaggatgggtgtataatgtgagcaacgggtcgacctttttcgtcgtgctcgtctcgcacgccgacatctcgtctcgatttgttgatctatgtttccgactgtagtggacgaacaaagcatacgacttcagctcgtccaccccgatcccctttcccgaacctctaggggagacgtgtaaacgtatagtccgcgggatcccgtgggacgaagtgtttggcaacatcgacgacgtctgtggagaaggatatgaagagggagggaggatccggccggaagggtatcacggatggaaggacgactacggtgagtcggcgggccgattccggtcgttcgatacgatcggatcgctcagcgtcatgcttttatacgagtagccccggatacagggatcgtgaacttttatcagactcgggataccctcatgggccatgtcgaccgatccgagctggatccttatagaccgctcatctcgatctcgtgcgtgggaccgtcagcaaacgcgaggctgacgatgacattaaatttttcaataggctcggacatgcgggcgtgttcttgctgggtggaacgactcgtcagactcctcctatcccgatcgtgctccgaagtggggacgtgctcgtcatggccggacgtggcagaaagtgttatcacggtcagtacaacctgcccggagaggactcgagaggatatcccgggctgatgatatttcggtcgacttgcaggcattccgaggatcatggaggggacgttaccggaccatctcaagctagatgaagagcgcgataggaacgaagacgaaataactcgggcttgtaagcggttcatctcgaatgccaggtgagtcacgaagagtcctcgtgatgacaaacgattgtttcagcgatggacgtggacgtggatctattgctgacggacggctgcacaggatcaatatcaacgcgagacaggtgtttccgaaagggtttcagaggcgcaacggaaagtaattgtgaatgacgagagatgcgagaatagcagcatgacgaccatcacatgcacaagcgcgagacgaagctcgtcccggtacttttagatctgtcgagctggtggtccagcagttcccgtcaccttggtgacgtggtcgtcgacgttgtcgctcgatcgagctgtgaatctcgtccgtgatgatgatgacgatgccatgaaggcaagagcgctgatggtggtatctcatcgtttgttaaccggggatcacgtatgcgcgtatgattatacgtacggatgtttcaagaaaaggacgatcgaccttgcgcgaacctgattgatcaccgtcgaattattgcagaggcagcgccaggtgagggggtgggaggcggagggtacggatgacggaagcagaaaacgggtgtaaaagaaatggctcgctgccagaacgggaaatgatcagaagcgggggaacaccgtcgtcggtgattcgtcgatctcgatgtcgtcatcatgatcacccggtcaatcccctcgtcccctcgccttgcgcgcactctcgcttttacttctttgcctcccttcccgcccctttgccctgcctgcccctcttgccttgttcccgggacgagctacgttaccatgcttggcttcattaccagatagagccagaccggccagaccagacctcgtagagcatggggagacatcgaacacacatccaggtatctacctagctaccttgtttgcaacaaccccgcagcatcgtcgattctcgatccaagagtccatacaccgtcacacatagtctgacaggtgcatgaatactctactcgaacgtctgcctacccgatttcaagccacctcaacgtctacccctccaactcgtcatctgctcacgtcgcgtccatagacacggtctggatcgatatactcgacctcttccatcgcaaggtagcgaggacgtcttgcaagcatgagttcactcttgcctaatcaccataggagtacgagcgatcggttgttgaacaactacctgtgagtaccgaccgcctatctgagccggagtttgagcatccggctaggacccctgttacacgggtactgacgattcttcttgaccaccacgtctcgtcccgcctcgacagttcgtctcagaaacaactcaccaccgcccttctcaccctcttgtcccactctcactcgtcgacgtcgtctcttctggcctacgtcacgtcttcttccggcgtcgcctaccccgtccgtcggtccgtacaacatgccgcctttgaagggcccatgaaccaggacaatggggaagattacgatagcatcaacggtaacgccacggaagccaagtggcacgaatacatcggctcgttggagcatttccgcaaagagctcaaagacgtccacatgctcgaggaagaactctctcaggtgaaaaaggaccgagagatcctcgtcagtcggttgatcaaggctaccaagtctagaccgaccaaggcggatatcgccgctgctgccaaggccggatccgacgtcgggaggtccagaccgtccaactcgagcgtcttgagtttcgggagcgatcattccaacacgaccgccgggggtggaagaagcaagcgggcggaaaagctcgccgaggcccaggcagaggttttggggtgtgaggaacatttgagggggttggaagtcaggttggagcaggagaggaacaaggtgagcgtcgtcgacatgttggctcaactcgaacatccgctgattccgaggggtcatcgtcgatcttgtcgtaggtcatgaaacacgggcttatggaaaggttcagagccatggaagatgtcggcaggatgtggcagcgacaggctcgactcggtatggccgagctcgagagttcgaacggaggtcgtgagtcgcatcggctcggatgcgattccgtggcagtgcaatcggcttacccatcttcaccttgcagacgatggccacaaccaccactcgaacgcctacgaggtcgagtcgaacggctcgatcgctccctcgcaatcggcttcgcaggtcggatacaactctgacggtgagcaggaccgacgtcagaggtcccacggacgtggcggacatgtacccgggatggcggcgagcgtcaccggcagtatcgccgaagaggacgagaactcgagcagcgatgatgatgaaaacctggtcgtccacgagaacaagcgacccggtgcgggaaccggtgggaacgatctccgaagcaggagtcagaccactatcgttccctctggaaacgctcagaatggaggtcagggcgtgccctcgatcaccaacatcaaggccaagcccgcgacccgtcgtcagcattccggatcgtccggctcttccgtcgcccgaggtcccggtaggaggacccaatccgagttgggttacaacccgcctcgtgctcgtcagaacaggatgagcatcaggagggccccttcgaggggcgccatgtcggacgcttcgagcgataggagcgtcggtcgtcgtggtggtggcaagaagaagggtggtttctttgctagcatcgccaaaatcttcaagggcaagtcttccggtggcagcatcgctggttcgaccagaggtggaaggcggggtggagccgactcccctccgttgacccagcggaacacgggtggatggtccaccaggactgatgataacatcaggcgagccgtctccaatgctggcactggtcgagggctatcgggaggcagaaagtcgaggaacgccgattattccagctcggatgacgagatgggcggcggtaacttggtcgccgtgaccaaccggggtaacaatacctggagcgtcgacaatgccgcccgcaagaacgggtcgacccctgctgcccccgctgccgcatccgcgggcaagactcgcaagtcgaggtccgacctcggtgctggtgaaaggggaaggaccagcagccagaacacggtaactcagactaccggcaaggtgactagcaagccccccggtgttgcctcccagccggtcaccaggtccaacaccgtcaagtctacatcttccggtgtcggatcgggttcccagcgaactcgtcacggtagcatcacccgcgtcggagcgcgaggcagcacgatgggtgcccctccctcgatcgcgggtgtgctcgagggagtcgttcccaaggctccctcgtcggctactgccgctagtagcaagcccgcacagaacagggcatccgagatccccaaggcgcctggtagctccattgtccctaggatggctgacgttcccaaagcgccttcaagccaggtgactcctaagatgtacatggccacggcgccccctcccaacaaggcgccgcttttgcagccccctcctgcacaaatgtccaactcggcctcggctcccgtaggactgagcgacggttacgtgcccaaggctgctgcgtccagcgtgagcaaggccagcaaggctagcaaggccagcaaggccagcaaggccaccattactcccaagaccgctcagcaggctcagcctcagcaacaacctcagcagcagcagcaacaagcgcctcctcaggccacgcagatgaccaagagctccagcgcgctcggcaatctgaacctcggagctcctgtcggcatgtcacaagccaatgcgtcggtcgacagtatcaccgctcgggcgtcgactcccttgccgccttccaagaccctctcgccgcccgccaagtccgccatgagggcgtcctcgccggtacctctcggatcgcctgaattcgaagcccctcctcccgctttcatgatctctgccccgggctctgtgatcaaggagaagcccaagcaggaggaggctcccgtcgtccttccccaggctaccgtcccctcgtctcagccgcaagctcgagccgagcgaccttcgacccccgctaccatgaccgacgccgactctgtgtacgagtctgccgttgaggaggatgctcatactgatgacgagcgccaggtgactggctcgcagcctttggcttctaatggaattgcggaggatgatgacgatggctcgtccgtcgcgtcggacagcaccgccggaccgggtcagagctcaaagtacaaggtcgtcgagaacaccgagggccccgctgctaagctgcgacaagctggtgccgcttcgacggctcccgccaccgctagccctgcggcacctgcacccgttcaagctgctccggagaagcccaaggaggttgcgaaggacgagtacgttactccggctgccgcctcggtcactggatcggctctcgagcgcagaaagtctgtccgcatgaacgtgcctccttcgccgggtacacctacgaccacggctcctcccgactcgcctactcccgaaggcaagcgggactcgtcgacgtggtcttccaggataggacggaccgccgacagtagcgatgaagaggataacgctgcgtacgccaaggccaggcggagtatgaacaggtactcgagcttgagcgcttcgaaacctgctgccgctaccactacctctacgactaccaccaagaagaagaagaagtcgaccaaggcgtaaatacagggctatgttctccatttcataaagtttcctttcgatttttcccacattctatatgtcaccgattataatgtacccgaaaagtattctattgttcttcctgccccggggcgtatgtgatgttacatgaccgatgattcgatggtatctagttctctgcgttggaacgaagtctgtacggtacttgtgatggccgggggttgcctctaactagaacaggcaagcgcgtcgacgtgtgtgtgtaacttactgtgatacgtcaccgacggagttgaccgccggaaagctagaaactgggatcgacaaccttgcagagacttgacgggtttcggttccgtgagcaaaggaccggtttcgagtgtgtggaggtacctttgtatctcgtcacatatacaaggtcacgacctcatgcccgacttagaccgcccaaggacacagcggtacagcacgacgatcctcgttgtcttgatcgggcttgtcgctcaagcacttataaccatttacgtcaatccgaccaacgattcttcagaaagcaaatcaggatccataatgccgacgatatcgtacgaggacgaggaggcggtcgctgtgtaagagcagtcgcagttcactccttgtgcgacttgctgactctcagcggaacgagcagttcaactcaacgcgaagacccatctacgatacagaacaagtttttggtaggatatcaaggctggtcagtgcatttcgactcactactagcaccgaccggcatatccgataccttgaacttcctttaggttcacatgcgaaggtgacggggatcccatcgatccaggtgagctcgagctctggcactgtctatgcccctagactgacagggcacttgtcgggactttctctttataggacatcacgggtccgtcgccattctcgccttccattagagacggtagctgatctcaagaggtctcagatggcttcattggatcgacaagcctcttaaagacggcggcagagtcacgtttgaacttgtgagtccctgaattaagacggcagcacgcaagtcagctgatcattcgctctggaatctcgaaagtggcccgacacctctgagatggacgatgacgaacttcacgaactgccaggactgaccattccctcagcagacggcacagcaagaccagcaaaggtcttttcatctcgaaacgcaaagactgtcaaccggcactgtaggtggatgcgcgatcacgatatcagcggcgctttcctacaacgcttcttgggaggtcagtgggcgtgtctccatgcgaagtattggacctccgctgatatagaaactatagaggtcaagaatggcgataatggaatgcgaaggtacagggacgaggtcgtagaacgggttcgggatgctgccaatgcgaacggtagagtggtaagtcctacgcagaggcccggaagatcgcatcgcgactgataccggacatgtagtggtccttaatgtatgatatatctggtgttcccagtgctgaagtggaagaagcgatcaaagcggactacctgcacattgtaagagcagcgtccagttgtgcggaacgatagagcagacgctgaacaaccttgattcagatgaacgacctgaaagtattccacgatccaatgtatcttcgggaacaaggtcgtcccgtaatagccgtctggggtatgtaacagatcgtgaaacccgaccgagatcaaagtggctgattgccagtcatagggatgggcatgaagcacgaaaagcacgacccggtctcgcttgtgaggcttttacgctggatcaaggaggtctcgagggagggagcctacatcttcgctggctgtccgagccattggcgaacgcgggacggagactgcgacgcggatcctgctttcgaccaggtttggcagaatgtcgacagtgtgggtaccagtgctttgagggtgtgataatcaagctcatcaaaaaacctatgcctatagatgtctccctggtatgtcgggcgttttggaacagtagagggtgctggagactttaagcaacggatggtcgaggatatggcctatcttgcagagcaagatcagaaactgcgaatcaaacgagactacgctccggtcgtcgtgagtgcgctctcaccatgacaaccaaagcaagcagtagctgacaggtcgacgttcagtttccaggattcgcttggcagaatctgcacagcggtcctcgtaacgagatcccccgcgaaggaggtacatttctctaccaacagcttcacaatgccattggcattggtgcgaagacgatttatggagcaatgtttgacgaatatgatgaagtaagaaagcgctatctggacaatgctgcggtatggcgtgactaagtgcactgtctttacaggccactgctcttatgccggccgagccgaaaagtgccaatactccatccgaaatcccattcatggcactggatgaggacggtatgaacctgccctctgattggtacctgtgagtgatgaacagaacacgagagcgactccgccattcaaccgatatatttgtcacagccggatttgcgggctcgcttctaatgcgttgaagacgggaacagcgatgcctagcgcattcccacttcaggctttaatggctgccagtcagccccccagagcattagcgtcgaaaatgtccggactcgatttgcaagacacggaagcgccggccgctatcgacacctcgaagatagaggagatgatgcagcaactcgcacctcctgttcagctctcaactatagatcatttctcggaagaatgtgagaagagctcggacttcgcttcggtcgtcgcacagtcggctgagaagactctttgctcctatctctagatgaggggctcgtcgatgagtacaagtacacaagtctacagaagcttcaatcgctccgcagtctgctacagagcgatttgaatacgcaagagttgaatgaagcgctcgtctatcgattgtggtttacactgctccgccttgaaggccctggacaccttcaaagcgttgagggtcgtcgcctgagtcgaggtaggtgaatgttcaattgctcttcaggggaaacaagctgatgaaagacgatgtagagtgtctcgcaaacctgcctcaatcggaacagctcatggttggcctcctgtctgacggtgtcaaacctgctttcgcggcaaatccccatccgcaagtcgacagcaatactggtcgcaaactagctgtagcatcgggtggagaaagggctcgacacgaaatgttcgagaatcaagcttggaaatccgcgtcatcctggggcattgttaacgtccttcgaggctgtctggagagaatgcctgtaggttaaaatccgctcaccggactgtttacaaaacccaagcttacaaattggcaacatgagacaggccgcgagtctgacagagaacatgggattgatcttgccacccttgctcaccatcatggacgactacgagactgtctaccgcgactatggcttggaatgccttaatactctgcttggcaaagtcaacgctaataccatgaaaaggatgggcattgacaagctgttcttgaaggtgcgctttagggatccggttgccaccttgtgacacgatctgaccatatcatcggcagtccgtacaacattcgatctctttgcacccttcgccacccaatcctccaatcctcgtccacgcattgaagactctattccgcctattgcctataatatacgacgtttccagcgcagagtacgccgacgaaattgcactttcggtcgagcatggcatcaaggatggctggcaatacgctccgtccggcctggacggaatggagattatgatcgaaatcgggatggcagtcgaattgatatgcgaggagatagaagtcggggttgtccgctggttgaatgtgagcggtatttgtgtcttgctggaacttcgtttctaggctcatgcgtgcacttgcaggatttaataccgggactcctgtcatcatcataccttcccccttccccctttgcggtgggccttcagctgacgaatgtacatgcgctacatgtgctggtggatactatcaaggcgacggggcgcgtggatcgctggagaggacaaattcttgacgctatcgggcggaactggatcggcatcgaggagcatatcagccttcgggaattgacaggtggcaaagcgggcaaaactggcgatgagcaggtcggccttcccgaattgcaggccgttcaagcccttctgaaggtgattgtgaacgatctcgtgcaagtccggccagacatgcgtcaagtgagtccgagcgaacacctccgccccggataatagctaacttgaacttgcgaacagaacgagcttccggctatgctggaattatcgccggcgttcgcgggcctcgttgctgagcacatcaacacctcttcgccagaacctagacagggcatacaagatgtggaggtcgcttcaggaccacctcccttgccgtcgagacgacctgaagatcatggctctgtggcgtctgaaccacctccgataccccctcgggttcgggtcgaggagactcagcagcgctcgcccgctgcaactccgcctgtcttgccacctcgatcatcggccgcgccgagcaccagccgtgagacccgtttcgtaccgcccgtgccgacgggtgggatgatgcaggctcctcgagcgccgccgagacgtactgtcgaaccggtcgagactccaggtacgtattacacgtctcgggctttcctcgccgtgagatactgacgctggattgtgtgattcgtaaagttgtcgaaccggacaattctcgagtggggcaagctaagcagcacgtcaaccagctgtatgaacagtacagtcctcagatagatcagggtcgtaaggaagcccagcgagcggcggacatggtgggcggattcgctggcagaatcatcaatgggaatccggataggagggacgccggacagagtgccactatgaaagacgtcgaaaggcttggtcagaaagcactttgggggctgggtaaagtgggcacgagggtcgcgggaagtatcgatcgattacagcaacaaagtcagaatcaaggtcaaaacacaaggtagacttgacgttttgaggtcatctttccggatgtccgatttcaattctatgctatgccagtgcggtttcgtcgtccgtacaagccgtaaagtctgcttttcatgttattctgcctctgaaggtttgcgtcaagtagttcatcgagcggtacaagccgatcagggctcaggggtcagaaggacatgatggcatcgatgatgttgctaatctctgtagtagtactagtacgccgcatgagagttgcgcccccccccccggtatctccgtcggggccgagctccatcatgccgtaattggattccggtacgagtttcgccctagaacagtcacggtcgcagcccgggccgcgactctcgctcgtcaaaagtggtgtagaggtggtggtggtggtgcgatgggatagatgatgatccacaagtacgtcatatgcgtcaccacacttgatacccttggaggaccgctgtaccgctgtgctccaagttgcaagttgaacatctcagtccgacctaagcttaagggcagcgctcgaataattgaccacgaatcagtctttcgtaccaggacgactcggcccctagcaactcgcgcgcaacagacagcttccccgacctctgagctctcaaagtgtgagtatactactcctctaagcagctatgcagtgagatcaaagagaacctgaagctaaaggcaccactcctcagaccttttccctctctcctcatcccattcctagagatcaaatccagccttcaagatgcctggatccaagcgtagagcgctcaagaacctcctctccccccactcacaccccaaggaaagtgctcatcagagcatgcccaccgggaccgagcattccaacgtggaccctatcgcggttcctacaataggacattctcccgctgatagtaccgacgggctcaccagtaccacgacgagccttcgggacctgagcgtatcacctctgcctccccctactgcggaccagcgatcagaagagcttcaactggtggatgacatgcagaaccgagagcacattatcgggagtgggcacgcgagcttggcttcctcgccttcgaacggcttgtctcctaaagggattgctagcccgtcaggaggatacaccgtagatgacctgttgaacgctggttctgagggaaagggcaagaagaagagcagcaaacagaggttcttggagcgagaggttggtcaggcgtcttgacggcccatagagaagggagctgatgagtgaataatttcggtcggtttgcaggcaaggaaaaaggaagagcgagtcgctgcctcgccccaggtggacccggccgagtcgagtcggctagagagggaaaaggcggaagaggctgatatcatcggtcggacttgccgagaactcggtgtcgagctccatgaagtgagcaacccgctcgttgcacgaggtatcccgctgcggtcatctactaaaggatttggtgtgcgctcgttttcccatcagatcgacccggatggtcattgcatgtactctgccatcgccgaccagctctatctgctcggtctcaccaaacaaccgtcttaccagatcacccgacatgccgcttcagaatacttgcgagccaacccggactcgttcatgccattcgtaccgagcatcatgggtgaagatatggccggagcggtagacgaagggggtagcgaaaaggtctatgcagagtattgcaagcgggtcgagcagagtggcgattggggtggcgagatcgaggtgagcccatgatgatcccgttcgcaatcgtttgtcgggactaagcacgagtgtcggtccgtttaccagatccaagccttgtcgagatactacaacgtgccaatccacgtcattcagcgagggccaccctttatcatctcccatgctcccggtgaggctgggaacggcacgttaagctcggaagagagcttgaagcagggaaatgtcgtgcgaatcagctaccacaggcgaatgtatggtctaggggaggtgagctcaatcgccaggatctactgatggctagcataaacgctgatcatttcaaactcaacgtgcgtcgatagcattacaactcgctccggcctgctcagagacatgccgcccctgctactaacggacatgtactgcctgtatcttgaggtgacctgaatgcagataacgatttatgatcatgtcgaatgggtctgaatagaagaaatgaacattggaatactgaccatagacttgacgcctgccgcgctgcctatgatgatattaggtagtgtctacaggagtagtagtgctagtctcaagttcgaatgcggtctagattaaggttgtccacatcccactcttgagctgtcgaggaggacacagtacgacattcggttagactacgacgaaacaacaacctcgtcgacgggatcttcctctcctgccgacctgcacgcaagccgagaacgccgaaagcagtcgataatatcgaacgtagacctacacatcagtgatgtcatcgagaactttccgggacaagatcaagaagcaggtgagacagtcaagacactggacttgatctagggtcgtagacgctcatcagtgaggtctcggtcatgcccgtgaatcgtgccgtaggatgacgatgacctgaccaaggggaagctaccgaaaggtaaatcgcaccaccacgagacaatgacatgagctctggacgtacgctgaaccgtgaatctccctctgttacctattcttgtaacgccttcggggcacaatagacttcactgatgcccaccctgtcaccctgaccgaagctcacgctttactgcaaaaacggaatatggacgtcaagctacttggtgtacccgagatgaagatggacaatgcgtgagtcgtgatcgtacgaacttgctggtcattattacagacggcaaggcataaagactcgttacatcgccatcttgagactaagcaccgacaggactgaatgaaaatccgtagagggaggtcggattgcagtcgcgagcgatgagagccaggaatcccgacatcattgacatacagcatgctaacgcgccattcccctgcacctcgtatacagcgtggtcagcggatgccgcaattatatcgaagctcaacaggaccgcttcgagggagagtcatacctggcgatcgcgcacaaaaagacgtcagtcctcccaacgtcgcggtgcttgaacatctttcgctagcgagcaagcgggacgctgacactgtttatatcattcacctcagtgagatccgtacgaattatgagaatgttatcaatgaggtcgagatgatccagctgctgaatctccggccacgagataccgaagaagccaaggtgctggtcacgtcgtgagtattgctgtccaggtcaagcggtcgaagcgacgtgcttttgccaccggcgaatccgtgcctctcgcttatcaatgtcctctttccagtctggagaagctatccaacgacgaagaccttcggtatctggcagagatcattgtgatcatcaaccgggacagtgcggttgagcaggagtagcccaatgtagagagctcgttttcggctgcctttgacgacaaatcgtatgggcttgcctaatcagcctcgccctatcacgagcacaagcctgcatccttgttgtaccggatataccatctagattcgagacgtgaagatcactttgtcccaccgactaggtgtcgttgcctcgccctcgttaatggactacaacgtatttgcatattcgttgtcgatcgcggacgctgggaacgagcgagcgagcgagcgataagcggacgagcgaacctggcccggaaggggcctcgcctaagatccatccatcgacaacgtcgtagggattaatatcatctcatcgtcgatcctttactcatacggttcaggtcgagtcgtcagaactcaccgatcaccgatttcaaaatctcaaacggacgatccagttccacttcttgcgacaccttgctcacatcatggccacgacgcacgactgactgtaacatacgccaatcagcagtctcacccttcgatctcaatctcttccgcctcgacttgacccctaaagcgatatatatactggcaacagcatgcctaatcaagaaccgcgccggcggacatcttctactgtcgcccatacggcccaccatcctcggggtcatgggataagacgatcatcatcccacgtaaacgccggaggtgtccggaatcacacgaccggtttgcaagcgttaaagacgaccaaacctgtcgctccgggtctggaacggcagggttccaataggagcgacgagagcatgggtatcaagtcgaacaagtcttctacccatctggccaggagaaagagttcggctcacggggatgacgtgagtgaaaccgatctggaccaatagcaacgccgagattcacgtccagtccggctccggtcctgttttcttgacacggtagcgtcctcgaactgtcagatcagctcgatcggatacacatctgccccgactaggaggtctgacggcgctttccacgacgagaccgactgcgaagcagcataattcggacagcaagcggctcgataccgccaaagcggccgaggatgaagattgggatagcgaggaatccgaagacgatcacgacagcgccgtggtcgacgacaatcagaagggcacgcaagtcgaccaagcggaatccgagtatgattcggacgagacgacggatgaggatgatgacgacgatgacgaggaggaacatctcgtcatcaagaccaaaggttcgaaagcacctctccgtaagcgtgcctcgatgagctctacagcacatcctccgacagtcgagcgagtctcttcccggacggaccaaacctcacgtacggaccgcggtcaggctcaaacgtcgtcgaggccgtcaggcaaccgctcgagaagccgaagcaggacacgtctacctaaccctggcgcggccgctgcgaacgctcacaaggcgcgcaggaagagtagcgccaggagacaatcacacgtcgaccatgattatggcaaggctggggtctttgcacgaaccaagtctcagatcgggttcgacgtacacggcaacggcgaccaccaatatcaagaggagcacagtgacgggtccgacgctgatgatcacgtcgaggcagaacgagctcctgccaaagagagccagcgggtcgatcggacgtcggaggctgaccaacagactagtgaaatcttgccagagccatctaaacccaccaggacagtttctggaagcgaatctacagggcctgcgtttgttgcatcccccaaatccgtgctcaatttggaagacgacgagaataaacccggtttccctttcccggctctcgatggtcaggtcgctgcgatccagcaaaaatctccatcgggatcgtccaaatcagcacgacaaacagctgatcgtcgtggacgcaccgagcctgcgctacaggtggacaaagctactcaatcgccagggtcggattcaaacactctcgtcggctcgaatgcatctcccggtcgagccgggacccctcggatgacccctggaaatcaacttccttcgggccagacggctcacacccccagcagcaacacgccgagtaccccaccggccaacgcgccgacgaggaaacacgtccggacgagaaattcgcatacctccctccgctcactcgcctcgatgcgattggccggtccgcctccacacccgttgacgtctcccgggggtgccaaatctcgagtgacgagcttgtctggccggtcaggacccgctatcgctgcgcctcaactgaatcgcgaggttgcgaggggtctatgcagtaccagtccgaccgagaccatgatctcgaacatcgaggtcgcaggtcggaacggtggtcagagcggtcatggcaagcacagttcaactcctccaaaccaagtcgcgcgaaccggcagtcaacggagcttgcgcgattactttgggctgtcgtcatcgagctccaagggcaacagtcgcgatgttgagcagcacgcagacatgtcacggaagactagcttctcctccatcaccggagcaggtctacctcgcgctggtagcagttctgtcctaaatgctgctgggcttcctgtaaatcaaggaggatccagccgtttgtctgctcattccgtcgctcaagcggccgctaggttaccatcgacgtcaaatctctcggcatcagcttatggggaccgactgcccgagtcttcccaggtcggcttaatctcgaggttcttgaccccgtccagctggaacccaaaggtcctcgtcgcatcgtcagcaaaagataggcatggcaagtcgcgagcaaacaccgcaccgggccacacggagaaacctagcgtcttcccgcctagtcctttcgctgctgcacatgccagcctcgtcagaactctgatggaagacgggtcaagacctgcttcgcaagtcggtcatcaaggccccctgcgtggtgcggaccgtatgcgaagcgacactggccccgtgcctcgagcttcggcagccttttcatctctcgccttgacacccgctcacaacgacgacggatctcggggacgtgggtacggcaaagacggcaagaacaacaaagagaaagagatggtacccggcctgacaccgtttgagatgagcgtcagccgatgtctagaacagagaaagaacgcggtcaggttgagcacagggggacctctgggaccgctcccgccatagcacagaaagacaaaccggtcagatcgaaacacgttgtagctttgtagatagttcaaccttttatcatgattgaaccccatttcagaatttgaatcgatcgatcgtgattcgcggcttatggaacgagcgttcgggtcgtcctctgatgacgacgagcctgatgaattgatgcgatcacgtcggccggttacgacggtgagctgggtcctttttttttgggtgaacagtcggagcaacaggatcccgaaatttcgtacataggaagaaacatcatcatatcgatcacatctgcatacatgtatattcgtagcgtcgtcgagtctgggattccaaataggtttgaaagaagcccgtatgactactctcgactcataagccaaccaccaacagcttctacacgaaagggaaagatcaaggcattcttgactgttcttgggtacgtaccacatcgtcagaatcccttccggtcttatcgaacgaaacgtcgtcatttctacagggctatcggagcggtttagcgtccggcatcgttgtcaactacctgattcctaatcacgtcaatccaaacggctatttgtctcgccttgataaggccaaacctgatagtacagcagcagaccagcaggtatatctggaattcgccgggctgatagctcctcgcgagagactgagtctgagagatactccaggactctagagagaacgtcgggagccggacggacagtgcgtttcagaagaagcgggacagtcgccggctgcaatgtcgaatcaggcaagttagagcacgcgcgaggtccggtctttgtgttcgtccaagcttaccataccaacgtcttgtttcatcaggatgcaactctgcttgcggaaatcactgctctcaagcaggagaacgctgctttgaagctagaaaatggcgagaaaacagaccaggtccgcaagattcaggcgaactgggaggactggcatgacaaggcaaacaagaaactcacagcccgaaacaccgagatcaaggacctaaaggcagaacttcagcagcggaaagctgtcgccccaacggctgccccgctgagaccggccggtggtgaccagctcagctcttcgacgatcaacgtcgagaaaaagctcgcagaggcgcttgtagaggttgagaaactgaggactcaaaacaaggccgatctcgacaaatacctcgagacgagcaaagagcttgaccaagagcgtcaagttcgcaagcagaagaacaagaaacatgagcagaaattgaaagagcaggccgccctacatccgaaagcgatgaaggataaagatgagtcgcatgctaaggcgatcaaggataaagaggagttgcacgccgaagcgataaagagaaaggacgagaagcacaaggccgatgtcacggagacacggaaactgcacgagaaggctctcgaggatacgattgtcagccacacaatcgagtccgataccaagtacaaagcgctagatgttgaacgcaaacgacttgagaagtcgttgcgggagaagggcgaggaggctggccgcttggacgataggctacgcgaattggagcaggtgtcgaacaagctaaaagagctgaacagccaatacggtttgctctggaagaagatgtgcgagatcttagaatcgcacccgtcgatgtatacgatgccggacaggaaagaggggcaggctagtgagacatctgtgaacctgggccaggcacccgaacctgccgcggagcgtaacgacaaggacgacagctacgatcacaacgacaaggacatcgagatgtcataggctagagcatgattaggcgttataacgagatagacacgacatgatgattttgcttgcgctgtgtcacttgacgacatgtacaaaagcatacctccatactagcccctcgggattcctgacttttacgagtcggcccactgcttctgatttggccaccttcatcttcgtaaatgacatcgccaagaggcgggacagagagacagcagcaattccatacccccgccctctggccaacgactgcgtgccagcaagcacgtatcctaaccgtgccgcaccgttgtcaggtttaggcgcttgcagttcctaaggacaccggtcatatcagcaagcaatagctgagtctcggaagactcctagtcagcttacccccacatcttcgctgtttcgcagtttggcaagctccgcttctccgacagtgtatatctcagcaaagtctttgggggaacccctacccactgtcgcaaccgtcacatgtacgagggcggcgtgccatgccgaactgcggtcagcgattgggaagggcacgttctgtagtgcttgacggcatctgtcagctgtgcgccaaaagattgcctcatgatccagggtgttaggacgaagcgatgcctgaaatccttgcagcagccaatccggtacaagccagggtttgctgccttccggcaagtcgagtgaagcggtccattccaggtcccatggcttctgtatacctacgacatcatattccatgcgttttccgggtggacgtcgatcccacctccgcttcctctctgcaagctcgtcggtacgccaatcattacctgagcttgtctgagggtaacaatgaggaaaaggaggtagacctgcttcgagatactgagtgccgcgttcttcaagacccgagatggtgctgccggtgaatacgaacgattgccaaaatggcatcgcccagccagcaggcagaaaaatggtataaccatgaatggctgccgcttggtcttcattggtcgtctcgctcgtcaggcttttctgtacgaggaggattggcactctatcgtcatcctttctgggctgtagccttaatccaggaattcccagctgattcgcggaagcgcgataaaataagccggaagctcaaaagattcacggccacgctctactcgacttgcctcgtttctgcgtcgatcgagatccgctttgcggtatctaggctttagtagagactctctgacgctttcgtcccagatggacgattccgccagctcgggactcggaaacactggatcaggctgtgcggattcatctgcctgtgcccgtgcaggacgagcattccgaggcgggaacctgcgtgctacttcacgtcagcatagactcggcgacggatgaagccaccacatcggttcgacttgcctgagtcggggatcatggaccttgagcccgaccaccattccctcgctcaattggccgctgctttgaacgaatttcatgccgttccaaaagcgttccttctccgagccgccaacttggtcgaaatgctcctcgtcttcctgctccatggcttgagtgatttccatgtccatcgaatccggctgctggcgtccagcggtagagcccacggcttgatctttggccaacccgatcacacctcgaagtacactggcgctcctaggtcccatgagctcgaaagcgcaaatgtctcccctcagatccttcatgacgattgtgccgtcttttcctcttttttgacccgaagacgagccttgttcgtaccaccccgacacgctcgatcggatggcttcccaagcttcgaggaacatggccgggtggaacctgatccagacctttttcgtagctccggggggcgacgaaggctgccagaggacttcggcgggcccgatcatccccaatggccactgtttatagcgatggagcaccgtcttgcccatcctcgtgcccgactcgtacctagaatcacgatgaaccctttagcccgcgcgcggggtcgattcgagcattcgatacgtaccggctccctgcccatccgtttcctccgacgacgccgctcagagctcctcttaggtcctcgacgaatccttctagctggacgatggcgtagaaactgacgtcaccgatgatgcacccattatgagccgctcgatgggccggtcgatgacacttggccgtaggcgtagcagcgagacggtaagaccatcgggtgatcatcttgcatcgtttagcatgccaaacgtgtgtctccaaccagcgtttcgactctgagagggcgggtcgggtcaggtcgggtttggttcagcgtttcatattctagaagaaacctcagggagggggtaaagctcacgttgtcgacctaaccagcggtccgtcacgctcatccccttgatcccctttttcctcctcttgtccgcctttttcctctgcatcttgacggtcttgtctcccttgtcgatctgttccccccatcgccaaagaaagaaaaacgacatgtatcatggtgtgcatggttcagctcgcagtgcggggtcgtccatcagcgtgacctcgaccccggaagcctgacctcgaacgtcgccttggcgcgtaatctcttaggcactcgacggggattatggctggccgctcttcgacgcaggtgtcggggtagtgattggaacgcccggacggtcatgtccgccctgttaagaaatcgatcgacgggagtgctcttggtgagaaaaaagatgacgaatagcggcaagcggggaaagaggtcggtacgtacgtagcttgtttttgagctcgcttcatcccatagatctcgaaagcccgggactatgagcaggaggttcaatgaatagtgtgagccgccggatgctgagttacgaggatgatagacccgaggtgcacttgccgtgataaaattgtcgacgtcgatcgagcccggcagcggtcgattagctgagaaagacgttgaaatcgaatctcagcgccggttgtctttcaggtaccgccttgagatgatacgcttgtggtattgcgacgcacctttgagtatactagacaccccttgtcctgcctgttcgatcttgcgttccgtcgacatgttttcgaaatcccgcttgatctgcttgtctgcaggcatctgccgacgattggccgacatgtcgatgtgatggccagacaagtcgatgcagggaggagcgtacggggaaagatcgaagcgatgacgatacgcaggactctccttcttcaagttgtggagaatatggctgagcgagaaaccgatagatggcaagcggtgttgtaatctcaatctcattgataaaagacgggggggggttctttgctaaacaacccaccatcatatgatttctgtcccgcggcgttgcttacgtaaactcatgatttgcttccgaactcgcgccggcgctagcgagtgacagagggcgggggcagggggaggaggtcgcggtcggtgtcggtgtgacctggaggtacaagcaagcatattcgacaaacgctgcttgctactaactgctatacatcacttgctctgcaaacaccatccatcccatcatagtcacgcacacccggatcctcttcctgtcaatcatcaacatcactcgattacaggacagacaacaaacaccaccacccaccgttcccgctcttccccccattctctctctccctcgccatgtccttcctctcatccttctcgaccgcgctccgtacccattccgcaccgctcaacgctcgattgggagctcaagttcagacccctacggacacgatcgacaagctcgtcgagaggatccaaacgagtccgagcgtggacgacaggaggacggccgtactcggattgaagggatgttgcagggaattcaaagaggtgcgttcggacacgcgacgaaacggtttcgccgagccgtcgcgccagatcgaaatgaatggtcgattgaaaagctgaccaggcgacttttgcccatctatcatccaccccgttttgctcgcgacgcacgaaatctatcgtcttgcggggtgataggaagtgggaacccgatcattagcctctctcatcgcggtactgcaatacgacgcgccgcaagatgccgatatcgccaaagccgtactcgagaccctgatgggcgtgttcgaggtcggggaaaaggtcggtccaggtcgaatctcaagctttttcgggtcgtctactagatgctgatcccccgcccgtgagggtcggctcgatagccaactagggatgacccgggtctacgttttcaaaacgagttcttccaggtacgcaatgatcactccacggcccgggtgtgacagctcgatatcgcgaaacaaacctgacactgcctcctcgggcttccctttgcagaccccggagcctacccactcgctactcaccatcctctccacctctccatccttttaccccaggttctacacgctccagctcttctccctcttactcattcacaacgcccacgccgtccaaacctacatcctcagctccccaccaccgggagtggacgccctcctctccgtcctcgacgccggattaccttcctcgtcaacgtccgcgaccgcacagggggaatccagcatgtcaggcggagctggggagatgctcaggaacgaaacgttgttgctcctcccccagctgatccaggggaacgcggacctgcaaaagatcgtggcgttctcgggagcgttcgagaggctgttgaggatcgtcgatggggaaggtggggtcgagggtgggatcgtcgtgcaggacgcgatggtcgggatgggaggcttgttgaggtacaacgtgtcgaatcaggcaagtccaggttcggattcgggttcgggtccgtccgtcatgtgcgaggggaaacgctgagcagaggtcgtactcgtcttttgatagaactatttccgggaattgtctctcatccgcctctggcccccgggggggaggggggggggggggggggtggggggggagacgaaagaaactcacccgaaaaaggtctgtgcttgaatacctcgaaagacggaatcccacctggtcctcaacgtgatcccctggacgttcaatcggctctgtccatcgatgtagacctcgatctcacctgcgagcgagtgagcgtacaccaggcgttcggatcagcgtggggtgggacagggtgagcgcacgtgagatcctgtcatgcgacttaccgttcgaagcgccgacatcgttcagcttgatcctctgggcgacggtgatccactgtccaggggtaaagtagaacgactttctgccgactagatgggaagggatggacgtatcgtcattctcgatcagtcgagcccggtttcaatgggtcgagtacggggtcgactgactggaatcgccgtaatccgggttacagtggctctcgggtccggtctgacagtacgactcgggttgttgagccgaggtagggaggtaattgtaagtctcccccgctccgtcggttcctgttcacgtagagtaggcgcgacaagactgtaatggtcagcgggagcaggaacgaacactcgatccgcggtgactcacgccacatcaacctcgagctgaaacaattatcccgtccgttctgcctgcctccggaacaccctactgcctcctcctcgctcgtccctccatagacccctggcaatttgccccccctgttgaattcaaagccgttttcgaacattatggaataggcaaacgtgatctccttggccctcttgagatcgtcctcccatttgccttttccctttgtgaactcggctccccagtgaggtccattggtataaaagctcatgcctccgttaggtgcgttcttgtttcccgggttgatgctccccttggggaagaaactgacgatggaccctttgccatcgggagcgtgtccctgtgggggtttacctcccttgacgatagggattccggcttggaggtcgaacctgtcttgcaggctcgtcgaggtcgtccaggccgagttcgaagggaaacctcctgcggggaagagacgggattgcatgtaggatacgtccctgagttcgagctcgttgtcggacgaggtgatgatgggtgcggccgaggtcaaggtcgagaggaccaagatggcgttgaggagggacgggatggagatcatcgtgaggcgaggtcggtaggtggtgttgttgaaaagaaaggcgaaggagtaggtggtcgacgggaggtggaccgtgtgatgaaaagcgtatatataatgtacgtatatgtgtgtggttgccgtcgaggctatgtgtgcgagacgaggtcgaatacgttccggtcaacggatgtacgagatttgactacgaccgagtgaacgaggtccgaggtgacggatagatggatggatgacaagtagacggagaagacgtttgcaaccggtgcgaacgtttatgtctacgggaagaagaaggaggacgaggacgaggacaaggtggcgggaacaatgaggaggaggaggaagagaggcggaagatatgttgagagtttaagatttgatgatgataagtttgatgagttgatgatgatggtggatcatcctccatcaatcaaaccaaaggggatccccagcctccttcccgctgccacattgtctccctcctttccgaggcgcgtcgggatttctttcctttccttcttttttgttccatcggatcagctaccgacgcgttacgcgttggaacgttcctcctccccggcccgccacctacacggcccaccgagactgacttgatcccacgtgcgggaagataatccgcttcacctccccggcccggcccgggactacgcgttgtccccccactgtgcccttcccggaggtttcacctttgtcacaaacgttagaacccggtgtcggtccatggaacgtcacaaaggaaagagaccaagaccaagacttgtcaggtgatgaggacgtcgactctactttgttctcccggcaggtgtttgaccatgggatacggaccgcagtctttattcgtgaaattacacgtcgctctcgcttggcgtcaccgcagcacatcccctcccgtcccacacgaagcgaacgccgggaaccggacgcaagaacaaaggtatgaatcgattactcacccacgcgatctagcaggacgggaaaccgaatggctagcagctgcgagacctaatatcgcccgtataagcatgataagcatgacaagtcgttggcctatcatccgggatgatgagcacctcttcgttcagccttcgtttcgtctatcgagcctggacgtccgtctcccatcaagaccacccaaacttccggcgccatccaggccattctttccaggtatctggcaggttccatagacgacggctccccatccgcttgatcatcgatgaccgccaaccgaacgagtaggggcgacccagcaagccacggcctgctacacacctcgtcgctcggcgctccggctacgtgagggggccgggagcccgagcatcccggctggctagagcgggaaagaccttcctcgccgttctcccgaggttgtcgttgcctcccataccaatctcttatgttgacacaaccttctaggaaggtggaggggcctctctagcacggtccatcgcgaaaccgggaggcagatgtccgaagaattcgaatcagaccataatgcctatagatgtgaacagctgattcgaggcgactgatacctgacggtcagaaatgaaatggagcctgatcgatcgacgtcgaacctcagaacccacagccgccgcaacaggagcagcatcagccgcatgagggactggtcgatccctgtgggccttctggcaagtcgctaccgcatgcaaagctgacgctgtagccatcgtacaccaagctgatgatgacaaaacagccgcaacagccgcataatcagcagctcggtgttcaaaccggcaccagtgatcgcgagggtcggtttaaaggtaatggtgggcctacatgaggatcgggagatgagacttcgaggacgaatctcttcgttggttgtccgggctttatcgttaccgtggggggtcaagcctgatatggaaccccgctggattcttgttacgctatgtgtcgtcgtattcgtagggagaggtttgacttggaccagtttgcgacgaggtttcctttgttaacttccgggcgatccatcatcttattgtatcatctggagactgtaatcggggtcatatgttgctcattgttcggctctgaaccttgtcgtcgtgatcaccgtcatcgaaagtcaagacgcagtgaccgatcttcgttcaacttgaagacgcttcggcgtgctgcgctcggcggggtctgtacaggaccgaatggttctgtttgttgatttcaactttgaaaaccgtcagtgtaaagtacttcagtcgtgatatgcctgctgctggtgcttttaaacgagccgtcatctactttccgaagggagggtaagcgatcttcgctgggataaaagtcgagtgcaaaccgagatgatccgagacttgatgcgcgaccaaatggggttctcagagaccatactcccttcaccactactgaccgcccgatataacagctcttcaagggatcgttgtcggactgaacggtttcatctcgttcttctcccagagtgatttctgccgcggaacacgcgcgcttgtgcaagtacgagtaatcgacctatccgtgagtgtgaacaacctcgattgtcgcaacgatgcgtgcaaccgggaggaccgtactgacgtcgatagctaagacgaatccaactcatacctgctgggttattttgtattcctggagggttccaaagacactaaggacctcgtctaaatactctttgcctactctcgatatcacgtgactttgtgactttgggactttacttttggtccgggcaacgtcgtcggataaccaacaatcgagtcggaggaaatgatattgaatctacacatattcaggtgtggtcaaactcaacacttgcctcccccctctaaacacccgcatcggatcttgtcactcacctcgacatatattcgcccatcacgtcctcgttcatcgtcacatcgtcgtcgatccgaggcactctacggctactctctcgcacgacaaactttcgttcgtttcgacccgcaatcaatctcacccatcatcgactcggacctcgcactatggcttccacctctaccaccactcccaagcagggagacgcctattaccttcccgagcttcccaaggtagccggcaccgacctcgacgtggccatcctcgaggcctaccgtatcgccgctgcgaaatgcgtcgccgaggccgtcgagatggacctcgaaaaggcttaccctggaattgatatcgggaacaaaaaggccgacttgtacgtggccatgcctaggtaccgactgggtgggaaacccgatcagtgggcggaaaaagtcgtcgcgcacgtgagtccccctttgatcgaggtcgtggtcaccctgtcgctcatgcacggtcgacgaaatcgctcactcgttcgattcacccgcctctagttcaagcccgacgagtacctgagcaagtgtacctcggaaaagggtttcgtctctttcaccatcaagtcggtcccgtctcgctccactattttcctgtttccctccgctgaacttgtcactggcccgtcactttccactcgctcgtttcaagctactccacctttacccgtcaagtcttgcgtcagatccgactagcctcgccttcgagctcgttaggaaccagcgccaaaccgttggacaagagcgctcagaagcctgggtacggaagcaacaagatcggacagggcaagaaggctatcggtgagtcccctcagttttcggtccaactagagatggtctgtcatctgaccgttcgaccctgtttttcctctccccctctcttcgattcggaccgcgcagtcgaattctcctctcccaacatcgccaaacccttccacgccggtcacctccgatcgacgatcatcggtgcattcctggccaacctgtacgaagctcacggctgggaagtcaccaggatcaactacctcggagattgggggaaacagttcggactgctcgccgtcggtttcgagaggttcgggagcgaggaggaattggaggccaacgctatcacccatctgtaccacgtaagtcatccggacggccggtgtgtggccaatagttgaggatagggtagactggctcatcgcaaccacgttggggatttcgatcgttctaggtgtatgtcagaatcaaccaagaggccgaggctgatccttcgattcatgacgaagcccgagcgttcttcaaaaaaatggaggatggtcagtccggcctgacctgactcgagctttccggacctggacgagtcgcactgacaatgtatcgccctgttatcgcggtcctacaggcgacgaagccgcgctcggtctctggtcccgattccgagacttttccatcaagcgtctcgaagagacttataagcgactcaacatccactttgactcgtacgccggtgaagccgccgtcaagacggaaaagatggacgaggcgttcaagttgatgcaggaaaaggacatgttggtccaggacaagggagcgtacttgtgtgatctcgaaaagtacaagctcggcaaggttgtcatcaaaaaggccggtgagcttggttcgatccgcaattcgctcaacaaggggacgatggcgctgattcctcgtcacaacctcgccttggacggacagacggaacctcgatctacatcgcccgtgatctcggtggtgccgcacagcgattcgaaaagtacaactttgacaagatgatctacgtcgtcgctgctcagcaagatttgcacaacaagcagttgttcaagatgctcgagttgatgggacacgagtgggccgaccgattggagcacgtcaactttggcaagtcggcgagggttcgccatagtgatatcaagtcgagctgaccttttgacgaccgtcgcgcctgacccgcaggtctagttttgggcatgtcgacccgaaagggaaccgtcaagttcttggacgagatcctcgccgaggccaaagatagcatgcacgagcagatggccaagaatgccgaaaagtacgcccaaatcgaggatcccgagtacaccagtgacgtcgtcggtcagaccgccgtcaagattcaggacatgtctgctaggcggtaagtcgtcgtcgtggtcgtcgttccgctttccccgaaacgattgactgaattcgtgctctcgttagaatcaacgactacacctttgacatcaagcgaatgacttcgttcgagggtgacactgggtgagtggctctgctcgtcgtcccggtagcatctcgagccgacctcgcaatacgatctttccagtccttacattcaatactcgcacgtccgactctgctcgatcgagcgaaagaaccccaacatcgtcctgcccgaggacattacccagatcaacgtcgacttgatcaccgaacccaaggccaaggagattgtctacctcctcgcttgttatcctcaactcgtgaaggatgccatgaaggattaccaaccttccggaatcgttacctacatgttcaagctcacccacgccgtatcttccgcctgggaaaccctcaaggtacagggacaagaggaggagctcgccaaggctaggatgtacttgttcttgtgcactcgagacgtcttgtcgagcgccatgaggttgctcagcttgacgcctttggacaggatgtaaagcgaccaggtccatattctatacgacacgctcatgaacaataccatgcccaaattgcaagattgacgagatcaaggcctctattcttctgaacacgatatgctcagcttctatcacgaccttggcgtcgttgcggctgcttcctgttccatcaattgtctagccttgagcttttcctcttcgctaggcgggtgatcaaacgccacctgtcctgcaggcgggccaggagcagtctcgacctcgacgctctgaacagatcggaccgagtcgacagatcgcctaggcgtctgtgcctcttgtttgatcgatgacgttcgtaggttctccatcttttcgttgagttgagcgtcgtcggcccgagaggttgtaggcttatcggaaatggccgtcgagccgatcgcggccccaccagctaccgtcgcaccgccaacggctccggccatgtaactcgaccgttgactttcgtccactacggccggtgacatgcccggcctcgtctcggcctgtacatgctgcatctctggcataccaccggccgcttcgagacctagagctgcagctttggcgccatttccgagaggtgcgacggtgggctttccgtccttgtccaatcgaccgccatcgggtgcctgtcgatgcaacgcgtcagcatggcaactgcagaccgagctcctagagtccagactgaccaggtgacactcttggaccagagtacgccagtagatgtcgtggtcgaacttgtagttgttctcgccaccaaactgagcatacgtccgatctgtcagggccatctctatcgagtcgaaacgtccgcgccaacatgctcacctcggtatccagctgttccttgggtacgatctcggtcatgtttgggttgaatcgaatctattcagacacgagttggttttcgttgctatccgggtagacgaccagtctgcgtaccttttccttggtgacgggatccatgaaaggctgaatgccctggaaaaaagcattgacccaccatctggaatgcatacgtgatcaagggtcaggtgcaggtcatcgagtatggggttgccaccaaagctcacggcatgttgaccacgatggctttccccattcgctcgacctagatgataattccgtcagatcgctggaaggagccccgaaaaagatcatccccgggctcacataatggttctgcaggatgttcaacgcttgacgagccgtcccgatcgaagggttgctttgcgaagtcgccgaggcatagtcgaccacgatggtgaccgtctcgacacctggaggtgccaaatcgatagctcgttcactgacaacccgtcgtcgattagcccgacttggaaaggaacgcaggttggctaaggccaaactcacaggtggaaaatcaggtgttcgatctgacggggacttttttgcgtgttttcgcgtccaggtcgcatatagacgataggtcgtccatcaaagtcgaatccgtttacgatactggcaagaacgtcgaaggtatcagcaaccatacatgcggcctgtctagtcgcatgcatattcacatctttccggtctcggcttcctaaaagtcgacatgacacgagtatcagctcgcacaacgaattcgcaccgaatcaggcgtagctcacgatcttgacgtgatcgggcttgatcagatccggtttgaattccctcctccattccatggttcccttgatcctctctttcgcattgtccatcttccatttcgcagctcggcagtaacgcggcatgcagcccgggtcgctcaggaatctcttttcccatggatggtaaggatcgctctcggggagcaagaggccgaaggcatactattaaaaaggccgatagcatcgtgggaagaggtcagccgagggatgatcagtgatcgcccgagacgtaagcctacctgtcgcagttcctcgatctggtacgagcgagcgagttcagctgcaatcgcacgcgaaagttaaaagaggggcgcaccttgtcttcctgttcctcggaatatacggccttcttcttgggtccacaaccctgggctggcgaagtcttgatctcgctagtggtaggcttgttcgggtcgtccgatactgacgacctgcgggacgagctgcctcccaatttgctgaacaatgatgacatggtgttgggtatctatatcgctgcagatctcaatcgaggtttccagtagagattcccctggctttattggtgtatctgatgggaaggatatcgattgaacacgatatggtgacagatgcgaacgatgatggccagatcagatcatagtagtgtcatccccttccaagctcgctcgctcatctcggcacgagcgtgacgtcacgcaagatcggtcatcggccacccaacgaccgatcctcccttcccattcgactttgacaaagcaatggttccatatcgtatgactgacatggtgacttttctactcgtccagggtgggaggaggaggacattattacaaggctgcacgctgtgaacccgcgccgagatcgtcattaaggggttcgtaatttagcaaacaaggctgaacactcgtgtcgtgtcccggggatcatctataggtaatctctcttcatcgcttgcttctcgtcaatcgtcggatattcttgggagcggacacatcgttacttcgggtggctttggcaggaccggtgggtacggtcggccgtggtgagggctgtgattgctgaatcttcttctttttgatctccttgccgctacccgaactaccgctcggttgagcctggataggttcggcttgagtgagggaaggcttcttctttttcgcctcctttggtttgagagccaattcgtcttctgatccgaccgctgaatggtgatctgttgtatcgtcgtcataggacagttgtgaagccagacgggggtcgttgttcgaaagcgatcgcccgctgagggaaggcaccgaccggtccatccgattgttcaacgacgcgacgaccgtggcggcccgtccgataggctgtcgtcgcccgttgctactctcgccgttcgacggtgcttcattgatggactgcaatcgctttgcttgtttgggtcgcggacgagtggacgaagacggtggaggcgttttcggtcgcggcgcggtcgaagaagcggccgagtgggtcgaccttctcgccgaagaagacgtgtctctggctcgggaatgacctcgagacgctcccctacctcgcgccgagttgggccgagtctgttgtcggccagttcgggtttgcctttcaggtgactcggtagagcgggatcggctgctggagaggatatttgcaggtacggcgtccggactcggcttcttcttgggcatcttttgcgtcgatttgttcggcttcgctaccggaggcgatgtagccggtgtctgtgggacatcctcggtctcggtagtgtccttcatttcatcgagcgagaccgagggggacggtgtctgcatcgcgatcggtgggaacgggtcttcgtacggcacaggcggtagatccacgggccctgtagacatcctaggtggcgtaggcgatctcggtgccagtttggtctcgctacgatgagacggcccgagaggcgtcgacggcgtagatggcggttgcaacgagaaactgccggtgcgattcggcgtgcgggggatgacatgaaagccgtgaggggtgatgagctgactctccaggttgaaactgatcggactctgctgggccagcggttgaggaaaagatgtccgtcgatgcggtggaccatcgagctctctaaagcttgtcgatgagccgagatcaggcatggtcggtcggcgtcctgccggcgtgacgggcggcacatcttgatcgatcggattcagcataaaggggatactggtctgcggaggctccgtctctcgcgggctggtcccaagtagacctcgacctgacgagccgcgcaaagacctgcgtctatcctcgcgcggctctggcgatcgagactgactcgggccagccaaaggcgcatcccctggcagagtcgacacgtcgctgcgagggatttccaccgacatcgcctgtcgtctcgtcaagcgtgattccattgccagccgactatgttccatttgagcaggcttcggctctgtcgaactcattcccctgaactcgggatcgagatcgtcttcttcttctggtttgatcgtggctccataggctgtagtcgacttgacatcgggttcacccaagagcccgctggtcttttcctctggctccggtgccaagagggacgccaaagatcgtcgaccggaaacggtccgaggggattccaaagccgattcttgctcgaccccaattattggctcgtcgctaacatgggcggacgagcgtgctgacgtcgcctcttggatcggctgcgagacggctctttcgcccaattgccccgcctgatcgccttcatctcccatcaattgcatgtcgacgtccatctctgcttcagcttctgctggatccgtgtccacttccatcgacatcgttggcgggtcgacgactggcgccgctgccagcaatcctccgacttcgggctcgccctctggaaaacctgccgtgtctggcttcggtgccccgctcgtctggtctagcctatccattccgtcttgaacgtcgtcgataatctcctgcttgacctcgtacgtcaccagctctggtccgacctcttccctcactctcgtccgtcttcccgcccgctcgtggaccagctcgatccaccccttgcggtaggtcgagtcggatcccccgacggcttcctgatcattgacgacctgtccgttccattcagccacgacctcgggatccgcaaagaggggcaacgagaaccctccgccgaaaaacctcgaattgatcagatccgccgatttggatccggacggcttggtgaggtaagccggagggtttatcgggttgcgttcgtagtacctcgtcgtcggggaagtatgatctgcgtcgtccgagactccgctccatcgtttattcgtcggtcgtgccgaggtggacggggtgaaggatgctcgggaatgccgagctttcggtcgactatccggcggagcgggggtgagttgtctcggcatgtccatggcggtgagcgggaccgggtatgggtgtagggcgggatacacccagtcggtggatgatgattcatgtactatcggactagccaacgacgtcctgccctccttttgtttccccttcacattacccatcgaccgggtggtctgagcctggcccatcatcgccgccgtcgccgtcgccgtcgtcatcgttgaaggtgtttccgagacgttggatcgtgatctccctcttatcgactgatcccccatcgtcctccctctcctcgtacctgtcgtccccgtcgacctggccctctctaccgagtccgacggatcgctcttcctcggtcgcttcttccccctcttgcccttgaccgtgtcgacggggactttcgggaggtccggtgcggggcttagggaatcggacgagctctgcctgatccgcctgtccaggtcggtggatcggtgttccctgctagtcccctgctccggtggtaagtcgccatcgtcctctgaatacattgaatcgaagggaaagccgtagtctaacggatgtcgaggcaagggcgatagggaacgaggactcgcggggtaagaagccgatgaagaagcctgatcggtcggtcgatcgatgatgagaattagagccattcgagcgtcgacgacgagaatctacgaaggggttgaaggggtacgtaccatctcatccagatcctccaggttgtacagttcgcccaactttgcccagatctcttcgcatgcgaggacgacgccggtcatttccctgatcttgccttgaagggcgatcatcctgaaatgacgatgctttcccactacgtgtcgtgtcggggatatgtacggtatggtagtcagtctcagtcccttcagcatgaagcgaccggtctcacctggacgagcgaaaggtagacaccggaggaacgccaactcgctgtcgagatccatcttttagcgttcattcccggtatccgagctcgaaaggccaggattactacactcacatgtcgatgtcggacaagtcttgaacctgtttcgatcgattcgagggggatgacgatgattcggcgttactaggcccgacatctcggtccaagtcgtgatccgattccatcacgaggtcggggtcgacatgtgttgttttttccccgttgccgttgccggtgaacctgatcaggtcgtcgaaaagggtcggcaagggagtggggcgccttggtggtgttgctaggtcgacgagacagcagctgatcgtagtcggtgtgttctgttatagctttgtatgttaatggaatgcatgatgcagatgcataacacaagatgtcatgatcgtctgccactactctctacctggaaagggtgagtaggggaagagggcacaggatcgatgattacctaatacactgtcactcatgtacgtaaatgccggtatatcatgtaacgaacgcatatcccggcaagtctcggcatgccggcatttcagacgttactcggagtctcgggtctaattcgagggttatgagtaatcaccaaggtcaatgacgggaatgcaatgccggtccccgatccttcaaacctatatatatccatccattcacctccaacttgccttagtctcaatctcccaacatatttgctgcaagaccaaactcagctacctagaaagtctagtcgatactgaaaaccgtatcaaacacaacaacaacaaaatgtctctctgtgaacactgcacgatcgctaccgtctgggaaggcaaggccgtaagtaacctcttgccgccgtcttcaatccacgatcgatccgctgcaacatcactaatcgtcaaccccctataccaacgcgtttctttaacatcaggagggcaaggtaagctaccatgcttcatcgaccatattctatccggctggtcctgatcgactaacgaactctctcccacgtgacgtagaccgtcaagtacggtcccaccgacgtctacgtcgccgagcccaaggaaggcggtgacaagaccaaggccgtcctgctactcagcgacgttttcggactcggtctcgtcaacagtcagttgctcgccgacgattgggcgcgagctgggtattacacctatatccccgacttgtttgacggggactacttgacggacgagaggaaggctgatcccaaggcgagtcgcgacgaaggaagtcgtcgaggttgagcggggaaactgatcgatcgatcgatcgatcgcgtgtgcattggccgtacagttcgacctgatgggtttcatcggcaagcacggtgaagaggtcacgcacaagatcttggacccctttgtcgccaagctcaaggaagacggggtcaagcaattcgccgctctcggatactgtttcggagtgagtccgcgacctcctgaccttgccctctttcgtttactctcgatgatgctgattctccgatggttgccaaggcacgatacgttctcaacctggcctttgccaacgaaatctccgtcggggtcgtctcccacccttcccttctccgcgtccccgaggaccacgaaaagttgtctaccaaccccaccccgatcctcttcaacacgtgcgagatggaccccatgtaccccgccgaggctcaaaagaagggagacgagttgctcgggaacgggacgcaggagggtgaaaagtacaaacgaaactattaccctgggtgtacgcacgggttcgccgtcaggggggatcagagcgatcccaaggtcaagcacggcaaggaggattcgttcaaggagtctgtcgagtggtacgtgcccgcttcctttcgaggcccatccgggtgcgacgccgtcatcagctcatcacgtcgtttcattccatacttgacgtcgtaggttgaagaagcacaacttctaggtctttccagcaggttcagcctgggttttgctatgtgtatcgagagcaaaaagacgaaatgttatcaaaatcgattgatggagattccgcctaggtgccgattaccaagctgagaatcttttcaaaggatgacgatatcaccaagacaacgtgttcgagccagcatcgcatgcctatcttgtcgaaaaggacgggtgaaatcgtctgtcatctacctcgaacttttgctctgtctctccattcctgggacctgtacagtcgatagcgatgcagcactgcgatcgtttgcagaatgcatcattgtcattgttctcggagtggacaacaagaccagctcatctagagaagctgtctgttagtagtctcgtctatctggaccttttgcaatgaacgatcacactagatgggagaccatgtaccgtcatgtggtacaggaaaagcagatcgtcctcgcaagattccatacctttgatataccgctgattgtttcaaggtaaatagtcatgttcagtccagagcgcacatggaggaagcggctctgcacgggataatgcgcgcgtattaccgtggggagaatcacagccaaatccagtgtaatgacagtattatcatcgtcagaagagaacacagagcttcctatcgctatctggtgttcactcgtaagcggaagcatgacctgttgatacctgattgctgaatgagagcgaaaatcaaggttgacgacgttcggctaaagcgctttccggtagcaaatcccttatcaacgttccaagatatgcttccgattgttccttgttccgaggtgacttgagtatgacgaacgaccttggctgctactatatccatatatctaggtcgattccggggacaagagacagtcgctttggaaaatataggcttagcgtcgccctcgatccatacgttaccaaaatgcacttgctaccgagagaacaggcaagttgatagctgactggaacatacattcgggtctgaccgttccatgcatgttatcaggacaagctcctgctggccaacctcgggtttctggctcagaaacgactcgccagggggctcaagctcaatcgatcagaggcggtcgctcttatcgcctttcaactccaggaatacgttcgggatggcaaactcaacgtggctgatctcatgcagctcggcaaggagtttcttgggcgacggcacgtaatgccaggggtcgaagagtcgattcatgacgttcaaattgaagggacatttcaggtgagcttttctgcacttgtcttccatctgctagctggtttaaacccctctcaatcgctcaggatgggtccgtatcagcaatatcatattttgttcccgggggagtctagtctaaacaccattgcttatgagacagtactttcctggtaacggtacacgacccgatatgctcggatgatggcaattgtgagcatctatgacccttttcttccaatgcctggcataagcctaacttgtcacatggctctcacagtggagaacgccttgtacgggtctttcctcccgataccctcggccgagcactttccgcctgtcacctatcgaccaaaagctcacgagctgcctggagccgtcgttttcgagaaagaaccgatcaagatcaatgaaggcaggaagaagtggaaaatcaaggtcgccaatgagggcgatcgaccgatccaggtagctctctttcgctcatcatttgcgatcgtgacccagctgactctactttccttgtccagatcggctcgcactacccgttcctggagaccaacggctccttgcgctttgatcgtattctcgctttccagcagatcctacgactggatatccccgcaggaacggccgtccgtttcgagccgggcgaaagcaaatcggtcgtcttgacacagtttggcggcaaacagctcgtccagggtggaagtggcatcgcgacagctgtccgagagaaaggcctggatatcaagagccccgaggctgtaactttggtcagagacctgctggagaagggaaggtttgctatcggcaacgaaggtttggcagaggtcatctccaactcgaaagagatggaacgagaggtagtgagttgacaaagtgcagacgaaacatgtgcgatgcggcccatgacgacgaacggttttcgcagtacgcgtccatgttcggacctacaaccggcgatagagtgaggctaggagataccaatctttgggtggaggtggaaaaggactataccgtttatggcgacgagtgcaaattcgggggaggtaggtgtgatgtcaatcggcgtcaggaggaggctgcttgctaatactctatctcacaggcaaaacactacgagacggacagggacaggcctcggacagagctgacgcagaagtgcttgatctcgtggttacgaacgcgctcgttatcgattggtcaggcattttcaaggcggatatcggagtcaagaatggcaagatcgttggaattggcaaggcaggaaatcctgatacaatggacaatgtgaccgaaaacatgattgtgggctcaaataccgaggtgagcgagagactgtgggatggcggcaggccatgttgctgatcgctgtgcaacaaaggttattgctggcgaaaagctcattatcactgccggtgccatcgatgcacatgtgcattacatctgcaccgatctctggaaagaggcgagttttgactctatagagtgacaagcacgaacaaagctgatatcacttcagcaggccatagcatccggtatcacgaccttgatcggaggagggacgggaccggcggctggttccaacgcgacgacatgtacatcgtccaagttctacattgaaacgatgatggcggccaccgatggaatcccccttaacttcgcctttactggcaagggcaacgactctggtgcgagctgtcaggcgttgaaggacgtggtcgaagccggagcggctggactgaaactgcacgaggactggggtagcacacccgagtgtatcgaccgggctctgacgatcggggacgaatacgacgtgcaaatcaacatccataccgataccctaaacgaatccggtttcgtcgagacgaccattgatgcgttcaagggccgaaccatccacacgtgagtctgtggatctttcgaggtggtcagtcatcagctggctgagcgtctcggcgaacagctatcacacggaaggagctggaggtggtcacgctcccgatatcattgtcgtttgcgagcatccaaacgtactgccgagttcgactaatcccactcgaccctatgcccacaacacgctggatgagcatctcgatgtgagccccgtccgtcgatagctcattaagtaaagtagctgacaaacgtccacgcgtattgcagatgctgatggtatgccatcacctagacaagtccatccctgaagatattgcctttgccgattctcgtattcgagccgagactgtggccgccgaggacgtactgcatgatacgggcgccatctcgatgatgagcagcgattctcaagccatgggtcggatcggcgaggtcgtcacccggacatggcggacggccgacaagatgaaaggcgtgaggggtcctctcgaaggcgatggtgagatgtgcgataacaaccgggtcaagaggtatatttccaagtacaccatcaatccgtgagttacaaggcaagtttgggtggttattcgtcgcgcattactgaacttgccagtcgtccactcgtgccagggcgatctgtcacggcatgtcccacctgatcggtcaagtcgccgtcggttgcctcgccgatctcgtcatttggaaacccgaaaactttggcgccaagcccgagttgatcgtcaagggcggtgtgatcgcttgggcacaggttagtgctcctggtcaattctagcacgatgtagctacgaggctgatcggtttgtcgtctcaatcagatgggcgaagcgaacgggtcgattcctacagttcagcctgcgtacggtcgaccgatgtgggcggcacagccatcttcggtgggtaaacattccatcatctgggcttccaaggcttcgatcgacaatggtcagtgaaaggctctctgctaggtgtgggtcagatgcgtcggacggtaaagctgactgcgcggttgacggggcgtgttaggtacgatcgcctcgtacgggttgaagaagatggccgaaccggtcgtccgatgcagggatatcagtaaacgggatatgaagcacaacaacagtctgccaaaaatgacaggtgagggcgccatgcggtctgtcaggatcaatctcgacaagatatgactgatcacgggttcgtttcgatcgaactcacagttgatccggaaacgtacgaggtcaaggcggatggtgtgttgtgtgatgcgcctcctgcaacgaccgtgactttgggcaagaagcactttgtgttctagctgttgcgcctatagtgtagttgcgtggttgtaacatgattctcaggagggaagtattatcgactgatcactccatctcatattggctgaacgagttgatggcgatggcgaatgttagcgcgcgtggaaatgatcaaaccagtctcgtgaatctcgacactttgctcatcaaaaaggtcaattcaccccattttcaacatcctcgactcgagtgatcgactgatctactggaggtaattcatctactttcatcctcggcgtacaacctcataacatctcccagtcagagcagccacactcgtcgaggcgcgaggcgacaaacacacatcgcacgagatggctccttccgattacgtctatggcgtcaccctcgacggtctctccaaaaacagtcagccccatcattcctttccctcacaagctgagaacctgaccgattgctcaatcctgatcggatctcctcatagtcaatactgatgaccttagaacgttctttgcctacgccagtaagtccctcctcagtcagcctcgtttccaaggccacattccgccatcgtgaatccatgttgatcgagattctacctgtcgtcgtcgccgattccttggacagcaaacaacctcatctttggccctttcaagctatctacaaacgacacgatatctttggaccttggtgtgctgagtaaagccgaggtggacaagatccttcaagccaagtcgggcttggaagcatcaaatgtgtacgtctgatcgggatcagcggtcatcgtccactgctcactggactatcagctaaatattaatctccttcctatcgcacgtcatattcacagcaccatgtctcaacctacaattagccatcagcccgtccctctcctctcgcctagcaactcgatgacgggtctcaattccaactcgctactcaccaactacaccctccccgcgtcccctccgtcagccatcgacacgtcgcccatcaaacccactcgtcatttccaccccccctccgacgtcttccgatgaactcccaaagaacgtctacgtcctcaatttgcctttagacatgagccagtgagcatctccgaccatggggtacgaacagcgcatggccggggctcgctgatcgatgatcggataggggcgaattcgaagccgtcttttctcaattcggaaagatcgaacacgcctgtctcttgtcgatgctcgattcgctaggaagacgacggtaagccgtgctcatcatcaggctaggggtatgatactcggtgatcggctgatccttgggggtttgcaggggtttcctcttgatggccagttacgaggaggcatgtaaccttgtgaacaagactcaggggaggacactcaagtgagtcggtcagcctatatcgatgagacactgagtggtgagctgataggaaacatgcgagcaggaactgccggttggaagtctcttgggctcaggtgcagaaaggatctcattccgagcaacaaggaggtaagcgcccgtcgatcggtttgcagttcattaataaagcccctgatgtaccggcacctctcccatcgatagcacctcgacaagccttttcgcgatttcagcctcctcccgccgattctcatcgaaaccaatggcaatacaacgctcctttccgaactccgcccgcctcgctcaaaacgttctcgcccgtcccgccaagagcgcctgtcaggcccgccgatagagcaagatcgtccgagagtcctcccccgaacatgacctcgaccaccgtcatcgctgaaggtctcgtgagtggtgcttgaggtggtgtcgcctcagctccaccaaaactcttcatctgcgtatatgtgtagtgtgtcaaagcgttcccgacgatcgaccaagtgatcagaggctttttgccccgaggagacgtgaccggggcgacctttctatcggaagcgtccagtcaccccatgaacgaccacacgttgactcggaccgcctcggtcactttcagaaccatccgtgaggcggccaacgccgtctcttgtatgcacggcaggttctatggcggcaagcaaatcaaggtcaggtgggaaggtgaaggattccctcgcaaggtcaaacgagccaccgcgcccgtccggctcgatcttggatctggacccggtttaggaatcggcaactcgccctcgccctattctggcggtcacagtacttttgcgactccaactcccccagctactccgtacgacaatcgttttccctttgcaagcaacaaccatccttctcacgcccaaagaggcggaatgcaggcgcacggccctcaagctgtcgcaccttttgcgcttcagcaatctcactggggtcaatctcacacacagcagtcgttctcttttcgaggattaccgggttcagccgctggcttcgctcccgcgacacagcagacgcttctggatcagcatcttccgtacatggagcagcgataccacactcgactcgactaccagaattctttcgacgctccggttccaaacggtcaaaatcaaactttatcgaccctacaagcgaatgtcggacactgcgacaactctcgattgaacacgccacagcgttccgatataccctcggccgcttcggaccgctcgttcgaaggcgtatttccgaccgcgctgactcccatgtcctggtccggtctgtcagagaacaagacggcacccccgtccccggggccgttcaccccgttctcgcccatgatgaacgccgatgaaggctttgacggcacgcagatgaaggaggaaaacgatgttttaggcatcctcgccggacttacctgtgacgacgagggtgaggatgaggaaaagatgatgtgggcaggtacagaggtcgtcaaggattacggcccgatcgggcaggaaagaaggaattccgccgtcgacgctgcgtaaagacgtctctctttcgtcaggaaatggatcctctttgtttccacgctcttcatcttgaaagcagctgcacgcgctgcgcacattgcctttatgctggtttaggtatgctcgcaccacgcccgacttgccgatagtgctttgcaaagtgaacaatcggaaatgggaaatcacagacgaaatgtctcggatcgtctctcgaatgtaatactacacgtttgtagtctggtttgcggtgcatgtttgttttgcgtactcgtagttttagtagaatattccgatcgatcgaccgaccactctttatacgttcaaggtggcggcctggatgttcttgagcgactcggcataaggctcgagagcgggcttgacccattcggccaaaaacttgtcgacctgctcgggagctcgaccgataaaggtcgaggggtcgaggagggtatcgagctcggcccagatgggctcaaagtagctgtccttgcggacccgctcgatcaagtcgttctcgccaccttgctctttgacgaccgcaccggcctcgtgtgacaagacacggatcttttcgtggcattcctgtcgatcaccgccctgcttgacgatggccatgatgatgttctcggtggccatgaaggggagctcttgcgatatccgacgaccaatgaccttggggtagacgaccatgccctcggaaatgttttgcaagatgatcaacagggtatcggcggtcaagtaggcctcggggatggcgatacgacggttggcgctgcggcgagaacgggcgttagccctaggaaattttcgtcaagagaccggaccgatcgacgcttacctgtcgtcgagggttcgctcgaaccattgcacactgctggtcatcaaagcgtcttgctgcaagaccatcaagtgcctagccaaagagcaggcacgctcggaacgcatggggttcctctgagaggtgcaggaccacatcagtttcgcgccgtcctgggtctgtctcgagggcgtgtgggactcgccttgtaagccatggcagagctaccgatttggtccttttcgaaaggctcctcgacctctttcaagttggccaacagacggactattcgagtcgaggtatttcccatcgtcagctcgatcaccatcagacgtctctttatcaggctcgtgagcactcactgtcagtgcagatcttgtggacggtcgctccgaaactagccaacggtcccaagacgtcggcgtcgatctttcgcgagtaggtctgaccggtgaccgggtaggcgtagggcaaaccggacaactcggtgacgcgcttgtcgagggcttcgaccttgtcgtggtccccgtcaaagagggccaagaagcttccctgggtccccgtggtccccttgacgcctcggaaaccgatatcgttccgggcgcgctggaggttcctcaagtcccacaagagttcctgaatccagagggtggctcgcttaccgacggtagtcaactgggcgggctggaaatgggtgaaaccaagggtgggcaggtcacggtaagtctgggcaaactcggagagacgcgagatgacggtggccagcttgggcaagaggatgtcgagtccgtctcggaggaagatcaagtcggcgttgctacccgatcgagtgcgaggtgcgagcgatgaatcagcctcgtgtcccgtccgtcaatacgagcgtcaactcgctcgactcactcggtgacgtagcacgaggtagctcccaagctgacaaggtccgaacatgtgcgcagatgagcgttctgtcgtcatgcattcccaagatcgagtctgcttactgaatgattccagcggcctcgggcgcgactacaccgaaagtgtgaacgtgcgccatgacatcgtctacgaaaccccaccgcgatcccatccaatcccatccaatccggctcgagtaatcagcatcctgtgtgcatggccggaacgggggaaccggacgcgttcctcgactcacgcctcctcttcttttcctctacggcggcgatcttgaattgttcctcatcgaggtccaggttggccttcatctgctcgatggccttgtccgagatgggcagtcccaattcctgagtaaaaacgcgagtttgtcaaccttgaccatcctcggctggtcgatgggaggtatacgatgtggtgggtgagggtgttgaccgagatgcttactttctcggcgatggcgaggttgagccagagcttcctccacgtcccgaaccgggtctatatcgagagatggacgtcggcgaggtgttagcaatcatggaacaggttcccgcccggcctagacgagactcacaccgctggagaagagctgacacatctctttcgaagcatatcggctgttcgtagtaagagtccataagtcattgtaggagagcagggaaggatagaaaaaagttggtagtcgggtggatgatgttcagctaggcagttcgaccacgaaagatacagctggtgaggctcgacatcgaactgacctggtcaggggggtctgataggtatccattatgacaagggggtctgctccgactatgttttgactggttggttgtcaaatctagtagaggctatgaacatgctgttgaccaagttgagtctttcgactttctcttctgattgaccgactgaccgagtcgctttcgggggaaacggaaccaaattggaatgataaactggagacacggacattagaaatattaatcatcattaatcgagatgtccgtgtttcaggtcgcaaggggtatcgtcaatgttcatcgtggtacatatggcatacagaggattttaggaaaccgtattgcatgtctgcctgtcatgacgatgtaaggactgctcccggtgggtgagaatacagatgcaaccgtgcatccgtcacgagttgcgatcgatcggaagggattgtcgagcggacttttcaccgtagattagcgtcaaatgaactgctcatcgtcgccgatcccgtggtttgccttctcaaatcagtggtagaggcaatcgatcgataatcgacaaaacggacctggctgaaatgttcaattgaatggctgtctggctatgacgacacagttcgatcgattctagaaccgcctactcgaaacacaagaaaggcgagatggatcagcgatgtgactatgacttgtctaccactgagccactgatccgtgttgtattttccagtcgtttgatctcgttgctcgactctttcgcattcactctcgacctggccacctactttcaccataccggccattcccccggccggcatcgtccgaagaggctggcttttgatttgattcccagacatttacatccgaaagagagatgaaaaagcatccgaatgtcaacattttaccgggaattttgcttccgttaccttcgacaataacatcggcgtcgtcgctctttccccgcatttttatgattccaagacctagttggttgggaccgggatggtcaatctcaactaaactcctacccaacctctgctcttcctttctgagccattcaaggcagcatcacttgtactcgccgtacttttcgatcgtccctcaacggtgacattgctttctgctcagatcggatttgtcgcgctttcccttgtttttcgtcatcgatcggctgacctgaacacctcgccacaaaacaactaagaaggaaacccttttggacttcagggtacaaccagctccgattccctacatcgaatttccagatcgatcatcacgacattagaactcggacttgggattcgatatcatctagagactagcatcagactcgactcgcgacccgacagaggactctctatacgatggcgtctttcggtctgcattcgaacaacgggacgttggcgagctcgttcggggcgtcttacagtacgtgacgatcccgttcctcctcaacctatgattgtcgaaacttagtcgacgtctcgcctttcctctcttgccgcagctattcagagcaacctcgaaaacttgatcgccaactcggtcttgtcgcctcaccaaacgcctcaccaggaatcgagtcgacgattttccgactcttcccatcattcttctcatgaccaccatggcggtcggccccatatgggccaacgtcacccgtccgtcatccccgaggaacaacccttgatggacgacgacgaggaagaggcggaagaccgagccaatggggtgatcgcctcgagttcgggcacgtccagcctctattccgaatcggcgcaggatgacgacaagattccggatatcgtcgccaatgctttttcgcactacggtcgacgggcttcgatgttgtccagcatcaccgagcatttccatacggccggggagagaagagaatcgatgctgtcccattactcggcatcggatcgagccaggttggctaaattgacgacgatcgtctctggagcggagacgggggaggaacctgacgagattcaccaggcccagcatcatcaccatcatcatcaccatcaacatcgatccaactcgatgtcccccaagttgggccgatcgagcttgaggttcaccccgctcgaacctaccgccagcgatgaacgaacaccgcttcgagctcctaccgagccgcgtgccttggaagaggctgccgagaccgacgacgacgacgcttcgagcgacggatccgcctgcgtcgagacccacatgctgctcgaccctgctaccgagctggaccctattgcggacctcgagctcccccacgatagcgccggtcatctgactaccaactggtacacctctgcatggacggaagcgaaagtgctgtgcaagtccgccgctccgatctttggaacgcaactgttggaatactcgttgcccctcgccagcgtcatctcgatcggacacttgtcgacgaccgatctcgcggcttcggccctggctaatatgacggccgccgtgacggggtattcgatcttgcaagggttcatctcttcccgtacgttcagtgttgacggtcgtttgcctaggtccccgatgtctcgtcactgaatcgacctcgtctgcgtatgtgtgatggtcacagttgatctggtcatgcctaccgcgtggacgtcgagtgagccacagcgggtaggatactggttgcagcgatggtgagtcggggatgtggacacgaatgcgcgcgtcgaggctgaaccggtaatgtctctgaatccgtttatagctcgatcatcgtgctcgctttgatggtaagtggggagcacgccaccgaactttgctcaggagctgcagtagcaaggacggcgctcatcacgatcttgcttgcgcacaggttcccatcgtcattgtctggatgaacgcagagaacattctgctccgtctaggtcaagacgaggccgtcgctttccgcgctgggttgtacatcaagtacctcgccatcggtctccctggatatgcgctgaaccagatgatgcgaaagtgagtgcgggtcttaccacgttgtctaggcagtcttcctgagcttcacgttgacacgcttgccacccgcccgcacaggtactttatggctcaaaatctgcaaggcgtacaccaggtcatcagcggtgtcgtcgctccgctcaacctgggtctcaactacctcttggtctggggtcctcctgcagtcaggttgggctttatcggcgcgcctttgactacgtctatcagtttcaacctttcgtgagtttcaccgacagaaaggtgaatgtcgggacgctttgttgatcttctcttgacattcgtagcgccacgcttgccgtcatctgggccatgctctttgcgcccaagaccgcttggaacggttggggcggtttcacgggcgaacaggccatgttcctgatcactcagggcaccttcggtgagccctcacatcgacgagatccgacgtgcaccgtaattgacaacctgcatgacgacaggcgccctacaggtcgctagtgaatggtgggcttgggagatctgcggtctcatggtcgcgtcccttggcacggtcgagctggccgtcaactcggttctcctctcgttctcctcgatcctcttccagttccctctcagcggaggaaacgccgctgccaaccgtatcggcaacctcttgggagcgaaccgtcctgtggaagctagtctggctagcaaggtcgctctgggtctcgccgtaggcgtttcggtattcaacaggtgaatggttctgggatctgtcgcggtggtcgccggggttgctaacagtgatccctcgtcgatagtggtcttcttgtcatcttgaggcatcagatcgcgtatctattcacctcggaccccgtcgtcgttgccggtgttgccgagctcaccatctacgtcgccttgttccaggcaagtcgagttttagaaccaaacgatcacgagctatctctgattgaaactccacacttgatagaccgccgacggaattgtcggagtcggtggtggtaccatgcgtgttctcggtctggtcaggaagggtgctatcctcaatctgatcgcatactacatcattgtcagttcccgcacgaaattcactctagcatgcgatctgacgattgacccgcttttccatcgacagggtcttcctatcggagccttcctctgcttcaaacgcgacatgggtctgcagggtctttggatcggtcttttcatcgggatcacctttgccgggatcgccactgccgccttgctcctccgtgtcgattggatcgcgaccgttaccatggtccgaaagaagttgggtctcaccaacatcaaggctgaagatggcgaggaagaggctatcgtcgccaagagttacgggactatgggtggcggacactagagaccgctctcatcatttgtcgacgcatccggaatggtcccgccttccccgactgcatgccttatcaagcttcccgcttcgcctcgatttcaccacctataatacggcatgggttccccgtgctcacccctcttattcatcaatactcctactctatcccttgcttttgtacttgccgagacgtacagcttaatgtctgcagagtcgtcgcttgtatccattttgcatgttcccacctaatagccatctacactccctctccatttcgggttgcgcgctaaaatgatgattgacccaagttgaccgactaacccgagtcgtcaaaggttcgaagggttgtaacaatctcgtactactagttgatgcgaccgactatgtgataccacgtcatagtaattacatgtgctgcaggtcactagaatctccaggtatcccacagcaaacatgaaactcactccggagagtgccgagtaccattacgagacgggagcgttcatcatcgtctcggacctccccgaaggttcccaggtcgggatcgacggggaagacaaggttgccgctcagttcatgggttacaagatgatcccatccggcctccatctcttcacccattcttcccccggtactgcggatgcaccgatggctcttccggtacgacacgggttgttcaggacgttacgtagccgtcagacgttggtcctcaagtacgcacccgaggaggaagaactgatacccaacctagccgacgctcaaacgggggaagaggtcgagacggtcttgacgagggaacacttgaagacgctcgatgggaatctgggcgtctacccgctttaccggacaaaggtgtggcagcggatgaccaattgtatcatgaacgaggacgtcgagcgagtggtaggcaaagctggcaagctggacagtttgatggagtcgccggcggatgacgaggtcgttcatggtagagcgcaaatggaaaaggtcctaccgaccaaggacgccaagacgttggactttgtggcattcgatctgaagcggtcgtggagcactcaagcggtcggggaagaggtcacgcggtactcaaaggacaagacttggctatggagggatgtcatcaacacacggttcgattctggtaagtctggtaggtagcatcgagactgatcgtcccggctgactttgtacacaattcgacctgccagacccgtcgagattgttggcagagatccagctcgcgttcgtcgtctttctctacgttcaaaactttgcgggattactggcctaccggcgactcctctcactctgcgctcggtgcgaagaattgttcggggagatgaacgacgactctcctacggacggggtgacgctcgctcctgaatcgatcggtcggttttacacgtcgctcgtcaagacgctcgagacgcaggtcaaggtcgttcccgagacgttcttcaccgtcgagctagccgggacggggatggaggacttttggctgacagagatcgagacgttgatccggaattacgggactcattctcggcgcggggatgtcgagctggatggtgccatcggcgtgttgagcgagactgtacggaccaggtttggttgggaccttcctgaactgcgtgatttaagaaggaaggcggctgaagaagaggacgaggatgagctggaggaaggggaagatgcgccggtcgtcgtagagctgtgacgacgacctcttgtggtgagatgaaaggaacaacgttcgttcgcgcaccagtcgacgcctcgagatgtgctcggcaagcgggccggctcgttatacccatggcatggtatccctgcattcttgctgtatcatgccggtccgattggggtttcttgcaagtgatgacatcgagaagatgcacaactaggacgtgtagacgatgattgaacctcgtggtgtgtcacgtgatttgatcgatcgttcgacccgaatgatccaagcatcatctactctatctagtacgtgagtacactctacatatgctacatacctactaccacctgtgtaaaagagggtgctctccgcttcaaactcagtccatgagacaagcttggtaatcataatcacgaacacgacgggacagcgaaagcgcagctccgaatcacaccatcttcgacggatcaaaggagaacgtctcgctgaatgacgaatggtgcgcaaaggacatagcgattctcgaaacccagcctacgatgcctccctggcctaccgctaggtccaagacgacgagtacgggaagccttcctcgaggtgagagctatatagtcgtgtttgattgcgggttcgagcgaatgggatcactgaccagctcctctcgcttgatcttcctctgccacgctcggccgaccccgacctttcgcttccatccgaaacacctctttgactcacctcccacccattatgggcctctcggaaaaccaaacattgcaacatctctactcgggcttggcctcgcctcgtggactgtacggacgttcccccttgtcccgtatggcatcccgctcctcctctcctgtactctccgcctgtcctaccccgaaaccacatcccaaccacctcaaaccgaaactcgccgtggaaatcatgccctactcggacattccgactccattgatgacgccgtcgaaattcgcggaatctcctctcaatctcgggatgatcaacaagaaattagagagcttgagtcggaatcggaatggacagttaccgatcctcgagcacctcttgtgtgaggagggtagtcggcctctgagtctcggtgagtgcgagcgtcagcgttcatcgattacatgctgatgaagggtcactgctgttcgaagctgctgatgatcaccggatctacgtcggaccctcctcggaatcgaacgccatcatcgcgagtccctcgtctttctgtgactgagcgctcgtgtggcatctgaccccgccctgtcatcacctaggtatacagccgagatcagctgcagaaacaggccacgctcttgggccacgaaggctcggtcctagcgttactactcgtgccagagaaaaagtggttgtttagcggaagcagtgagttaacgtctcgagcgggatcctatgggaacgagctccggctaacgaccggctcttatgaaaaggtgatggaacggtccgagtgagcaccactatttgtgcataaagggctccgttgttgacgcagtgtcgattgcagatctggtgtaccgagaccctgtcgcccctctgcgacatcactcctagctctggaacgtcgggtgacatttattgtctcgcatgggatcctcgtgcaggaggaaccctctactttggggatcaatcgaccgacattgaatatgtcaactttggaaaatcaaaggccgaactgcaatcaagctactttggtaccgaacccgtcaaggtctccaagacccggtcgagtcgagtctttccacacaagtttttctcggaacctcgacccggttcgcccgctttcaacgggagtcctcggagcattcgtaatatgcagagcacgcccctgacttccccgggacctcaatctagcgcatccatcttgccggaagagctctcggtcccgctcgacaatgtcgtcagtagcgcgcattacggttacgtctactgcatgcaaatgatccagcgcccggacgatacgtggtggctggccagtgggagtggggatgctgacgtcaagatgtgggaatgccgacctggtggaggtctcgagttcctcttcacattcggggaactgcccggagcgacgctctcgctgtcctaccgtgacagtctgctctttgccgggatccaaggtggacagatcaaagtatgggacttggagacgcgttcgtgcatccgaaccatcttggctcacaattcggatgtcatgtccatggcgattgctggatccgagctctacgccgctggagccgatgggatgatcatccggttcgactctagtttcgactgtacggcaacattccaggcccatcaattctcgatcctatcgactctcatgctgtcacaagaaggaggacgatatagtctcatctcggcaggcaagcggttcgtcaagctgtggaatctgcctcgaggggaagcggccgagattacgcccattcggcacgatgtcaaccatgttaccccgagcaatgacggcgatgtcatgctttacggtctgagcaagatgatcgccatcccgaccgtcagcgatggcaagcacagtgaaaattgtaggcagggtgcgcacctgctaaaacgcctggtcactcagatgggtgccgaggctcagctcttgccgacgatcgatggcaagaacccgctcgtcttggccaaatttcagggtcaatccggaacaaagccccgtaagcgagtgttgttttatggtcactacgatgtacagccagcgacagaggaagaatgggcgaccgatccattcgagctttctggacgcaacgggtatctgtacggccgtggagttgccgacaacaagggtcctattctcgccgtcgcgtgtgcagccgccgcgctacgcgagagaaggctactcgacgttgatcttgtcatggtcattgaaggagaagaagaagcgggaagtgccgggttcctccaggccatgcaaaagtaccgggaagagatcggtcacatcgacacgatcttgctttccaactcgtcatgggtcggagaggacgacccttgcgtggtttttggtctgcgtggagtcatctacgccaacctgagcatcactagcaagaacgctgacgctcattccggagtcgacgggggtgccgtcgccgagcccatgttggccatggtcaggctgttgtccaacattgagaacggcggtgcggtcaagattcctggtttctacgatggtgtttcgccgctaggtgaagaggagaggcggtattaccaagaggttgccaacgtctccgacatgacagtcgagacgatcgcaaaaaaatggcgggaaccgacgttttccgtggccaacatcagagcaagcggacccgccaataacaccatcattcccaactcggtcacggccaatgtttcgttcaggctggtgccagatcaggtacgttctgtgatacatagcagcagatgctcttcccgatgattgacagagagtgatcttgaaccaggacctcgacacgatcgtggagggcctaaagaaacactgcgacaatgtcttttcagagatgcaaaatggcatgaccctggaggtgagcgcgattgggcgacgggctagggtgcaggctctgaaccgttaccttgacttgcagatcaatgtgacacatcgcgcgcgatggtggttggctcacccggagaatgcctactttcaaacactcgagagggcgatcgaaaagatttggggacagaagcctctgcgtatcagggagggcggtgtgagtgccgtcttttgaccttgatctgcaaggtgaagtcattgctgacggcgtgcgtgcacacagtcgatccccacgataccgttccttgaagagcttttcaacgctccctgcgtgcatcttcctatgggtcagcactcgtccaatgcgcatctgagtaatgagcggttacgactattgaacttgaggtgagaatgatgtcgtgcaatctggagtgtcacgtcctagtctcatcccgcacgccttggctacacagaaacggcaaaaaagtcatcgaggaattcctcatcaatgttgccaaaatctagccctcgtctgttcgcatcatcacgccgtttacgcacacgcatttgtacaacaaccgatatcgtcattacagcatgcatcgtcacgatcaaacgttccttcccaagcttttccagacggcgtttgcgacgccccgcatggcttgtcgcgtctcttccccttcttcgctgctctgtaccatgactggtacgccgctgtcacctcccgagctgatgacgggtacgactgggatctcgccgagcacgtcgagcgagagatcgtcggcgacggctttgaaagcgtctggcgatccaaacaattgatggcgagtcgagcagcacgaacacgtaaagtgcgattggttcaggatacttccaaagatctgattcagggtgcatgtcatggtcagcctggtgatatcgatggaatgaccagatcgtgtaggcttacggggatgtggatctttctaaacatgttgactccctttctcgcatcgatcagggcgacgtcctggggtgtcgagacgatgacggcgcctgcaagaccagcgtatcagtgggactgtagactttgaacgacgcacacccggcccggacttgccgtcgactatcacgagctgaccgagactcaattgcacgtcccccgtaccaggtggcatgtcgatgaccagaacttggagatcccccgccggtgaagtccagtcgacgtcgaacaaaagctgcgggatcggacgtcgtcgacggtgagttttccccgttgagcggtcatacggttttgtctggcagactcgcctgttgcacggccttcatgaccatgagacctcgccagaccacaggagaatcgttgttcgcactgggagctatggatgatcaaagcagggtcgatgtcgggtcagtctcgtgcgtacaaaagtcgactcgaccgtggctctgcgtggacacgtctggcggcttcagaggaagtatttgtcgggctgtcgactcgtctgcaaggaaacggtccgagagaaatggcgcagacgtcgtttcctcgcatatatcgaacgtcacctgctttctggcgaggcgacatcgccagctgcagggctttcagtgtacgtccattgacgatcgctcccctactcggcttttcagtcgaggtgccaaagggtcgagcgaggaaccccgtctctgagcagaggctgaccggatcagggacacgcctatcgatcgacaatgtccgactcgtatctgcagcgtgtccatcgctgttgcaagacctcgcttgattcttgtagtcgaggtttgaagcgttgccacttgaggacgagacatgacttcccaaacgtcccgcgtcattgtcgtcatcgctgcaccgagactcacgcaagaggtaccccatggacatggtcttcactccgtgattatccatcgggatcaacttgttggcttatctttcgtccgagcgcacgtcgggggtcgaagatggtcgtcgcaggttgcagttcgaggtcggtttttatttcgaaatcgggtccggggccaggtcggagtgcggacgagatgacaaaagtagaggtccagttcggttcggttcgggtgggcgattacaggtcaagatcagggtggaggtggagaccgtacccagccagatagttgatcgatatccgacgagatagaaattgcgtggatgacggaaaagagacgagacgagatgagatgggaagagagcccgagggagaggggggaagcgacgataagcgaagaagacgaacaagagtaccgatcagtcccacccgcccccgtgatccgtcgatttggactcgactggactgacctcctggactcaataacggttctccgaccccttcgagacccatgagtttgggtatgctcggaccgaatatatcgagatctaggagtcccacccctgtacccgtacccgcacctgtgctcgagccttgctcatgtccatctccttgtaccgacgccgaggtctgtgcgagggctacggccaagttggctgcgatggtgctcttgcctacccctccctttccgctcgagacgacgacgacgtgtttcacgcctgggatctttcgtttgacaggtggacctcctcggcgtggcatggtcggtgctgggttaggatcccggcgtggaatgccctgtgaaaggggttcggtatcagttggggagagagggacgacggggatgtctagtaatgactgactggcttacgagtgggttttcatgggatgcgagggtggacgatgtggagatccatcgtgttgtgggtagtcgtcgcaagatagaggtggttgataacatcatgatatcgatgtcgatgtcgacgttgaatgatctgatgggatcattgatcgatttgattgatcgatgtgatgtgattattggaggtgattgatcttgattgattgatgggatggatgttcaagttgatgtgatgcgcttaatgaacacgcggtaattgagagtgacgtaatcagtctaccagtagctggctgtgatgcgcttctatttgtcatttatacttctttctgtttgatttcattaaacgcgtcgatcgcgttgtttgtttgttgacccacgtcgaatcacaaacacgcagagcacatcatgcatacaactgtgcaattgtcattgacgtcgttcccatactttcgctctcgactactctgccgtcccaaacatctcaggacaagatggtgagcaccctgttgtctacgactttcttcccccggctgacctcgtgacctcgctcctcagtcctccccgttcccctctcaaggctcatcagcgcctcctcgacgcaacaacaaacgagcccgttcccctggcggtggcagcagctcgaccaacccgttcgccaacgcacaggattcgatctatcctcgaggaggagcaggtccctcgggtctccggtcctcgcccccaccgtcctccctcccgccttcttcccctccggctccgtttgatgggtttggggatgacgaggacgtcgatgatcaggaagaagatgctagggagatgggacgacgggtacagggtgcggatgatgacgaagatggcgaggacaatgaagacgaggaagatgcaggcgaagacttgttcggggataccatgatggcgtgagtatatggaatccccgctctgacccggctcgacccacctttactgaccccttacccgccgctacggccccacgtccccttcagcgattacgaatccaacctcggcctggatacctactcggaagccgacctggacgacacgtcctcccaacccgccctgacccgcgctcaacgtctcgccgccgacgccgcgatgaaccgtcgtgaccgcgggttgaccacggggacccgtgcgagtcgacgaacgcgcgctcccgcgttccttcaatctgacgacgaggacgaggctgggttggatggtggatacggtgccgggttgttggaagggatcgaccctcgtcgtcgtcgtcgacaatacgatgaacgcccggaagatgacgatatgcagggggatgccggggaggacgaggtccccctagaggaactgggagatatcaaggcggcctcgatcgccgaatgggtagggatcgaggcggtcaggagggcagtgcagaggcatttcaaggcgttcctcatgacctatgtcgatgagaacgggcagagcgtgtacggtcaacggatcaagcatttgggagaaggtcagtagcacacgggtcgtcgccgtcgtcgtcgtcgtcgtttcaaattcgccgaggctcaccctgtatttcaatccctcgcgccccgggtagtcaactcggaatccctcgaagtctcttacctccacctggcctactcgaaacccatcctcgcctactttctcgccaactcgcctcagccgatgcttcagatattcgacgacgtcgcgctcgaagccatcctcctctattacccggcgtacgaacggattcattccgagatccacgtgaggatcaccgaactacctaccagtctcaccctgcgagacctgcgtcagagcaacctcaactgcctcgtccgcgtttccggagtggtcacccgtcgttccggcgtctttccccaactcaagtacgtcaaattcgactgcgggaaatgcgggacgacgctcgggccattcttccaggacacggcgaaagaggtcaagatcagtttctgctcgaattgcgaggctcgaggaccgttcaccgtcaattccgagcagacggtgtataggaattatcaaaagatgaccctgcaggaatccccagggtccgtcccggcaggcaggttgccgaggcatcgagaagtcatcctgttgtgggacctgatcgattgcgccaagccgggcgaagaggtggtacgtaccctttgcgaggatctcgctcatggctcgacgagaaggattggacgctgatgatgacgctcacattcacgccgccgggcaggaagtgaccgggatctatcgaaacaatttcgacgcttcgctcaattcgaaaaacggtttccccgtcttttcgaccgtgctcgaggcaaaccatatcaacaaaaaggaagacctgttcgcggcgttccggttgacagaagaggacgaacggatgattcgcaacttggccaaggacgagaggatctcgaaacggatcatcaagtcgatcgccccctcgatctatggtcacgaggatatcaagacggccatcgccctgtccctctttagcggggtacccaaggatatcaatcgcaaacatcggatccgaggggatatcaacatcctcttgctcggagatccggggacggccaagtcgcagtttttgaaatacgtagaaaagacggcgcaccgggccgtctttaccaccggtcagggagcatcggccgtcggtctcacggcgtcggtgcgcaaggacccgatcacgcaggaatggacgctcgagggtggcgcgctcgtcctcgccgacaagggggtctgtctgatcgacgaattcgacaagatgaacgacgccgatcggacgtcgatccacgaggccatggaacagcaatccatctcgatcagcaaggctgggatcgtcacgacgttgcaggcgcgttgtgccatcgtagccgcggcgaatccggtcaggggcaggtacaaccctacgatcccgttccaacaaaacgtcgacctcaccgaacccatcttgtcccgattcgacgtcttgtgcgtggtcaaggatgcggtcgatccggtgcaggacgaattgctcgccaggttcgtcgtcgggagtcatctcagaagtcatcctgggttcgaagaggccgtggacgaggtcaatgtgtcgaccgtgttggacgccgatgtaggtgtcatatcgagcgcaggttccgctcgtcgagactgcagagtggctgacgacatgaccttgctctttaaccccaccacagatcatcccgcaggatgtgctccggaaatacatcatgtatgccaaagagatgatcaagcccaagctgcaccagctcgaccaggaaaagctggcccggctctactcggacctgcgacgtgaatcactcgccaccggatcgttccccatcaccgtgcgacacttggaatcgatgatcagaatggccgaagcgagcgccaagatgaacctgcgcgagtatgtccgaagcgacgatatcgatctcgccatccaggtcaccgtcgggagctttgtcaatgcgcaaaagatttccatcaaaaagacgctggagagggtaggtcgaccgccagcttgagcctcgtgtgtagtcggctgacatgtgtcttatcgctcgctgctgcagggcttccgcaagtatgtacacaaagcaaccgatcacgccgaattgttggcgttcttgctgggtcagctggtcaaggaaaaggttcagctcgtcatgattcagcgaggtcaagaacccgccagtgtcgaaatcgcgctctctcagctcgaagccagggtgagtcggcggtgcaggttgatcagacggcgcggcgaacatggctgatggcgacctctgcctgcttttataggccaaggagatggaaatcttcgacgtctcgtcgttcctgcgctccaagctgtttatcaccaacggatacaaattcaagtcgaatgaaaagcagattgaaaaggtgtttacgcacgtcaacccggacgagctttagtgaacgttggcgacggaggactgcggccgggattcccgaggctcgtgttgtatggtatgcaattttgtacatggttcttccaacatctaccctaattcagaacgcgcgaggtgtatgatgcgtctagaactcgaacccctgacgtcgaaagtattcgaggtcggtcccggctatggccctttcgatgagatccggtcgttcctgtcagggcgaaggcgaggttagtctgcgagtacgcatagaggcgccgtacccagactgcaacgcaccatgccgtcaaatgcacgacgaagcgtcgaccaaagggccgaactgttgttcgccggatgctcgcctgcgttggtcacgttgggattgcttcgtttgtcttgcgtttcgtgcagagcgagtgccgccaggactgtgcgggaagattgggctcaggtccggcaggggaacggcaaggcgatcggcagacacttacaatgctcggccgcctcgtggtggacgccaatgttgagacctagatgagcttcaggtgagccacgggtcctggttgcaaagctcgtttgacctacaggaaacgccaagattgtagatggcccgggtataggtaggatgcagctcgagcgctcgtcgatacgcatcgattgcttgctcagggttgccactgttggccagtgtagccccgagccgattccacagcaaaaagtcctaaaggtcgtacaggacgtcgtcagcatggcgctaccaaggcgatcgcttcaaacgtcgaaactcacattgggtctcacgccaagcgccgcgacccagcaatccctggccttgtcgaattctcccgtctgatagaacaagacgcccaacccgacctgagtatcggcatcgacaacaccggcgcgattctgatcccgagcgagattcaagaacgactcggtcatcttttggttggccgaccaggggttcgggatgaagccgttctcgtcggacaggtcgtcggtaaagatgttttgttcttcgggtacaggcccggcgtactcggggtggagcaaggataggtatcgatgcagcgaaagaagagatgagtgatcgtatgattcgttcgtgtacgagatggccagcgcctaaccgggtcgtccagcgttcgttagccatgtgaccaccagggtaccccgccttgatctcccactcaccacgagaccctcgcccatcatgacatcgcccagcttgctcctgtcgccgcctgggccgttccgcttgctgcccatggcctcgaaccgcttccttccttcctccagagcccgcaccgctgcggcctctttttcatccatggcctggaccatgcctagcaacgtccacaccgcggcctcacccccagccttgatcttggcctccatcgaaccgggcttgtcctgcagcccgtcgatcgagaggtgcgagacttgttcggccgtggtatgggatgacaagcaggattcgaggaggagtgcaatctcgctgagcgggccgttgttgttcagcatatcgagcgcgcgaccgagcgcttgcaggtcgtccttgttcggattctcttgatctgccggcgagacgtccacatgagcatgatggtttctagagaacgttgacgacggctacttaccaaaggcgtaatcgccgaggaccggaaacccgtcctcaccaaacctcatcttttcctgtcccatcatctcttccccgccccactccctcgcatcaacgtccttcatgtattcgttcaggtcgaacccgagctcggccgcgttttcgtccaggaggtccccgtcgtcgtcctgcttgttggaaaactgtgaaaagtccttttcccactgggcgagatggtctaggtgggtcgtctcggggcggatagattcccagacgctgtcatcgacgaaagacgtcggtggtggcgcggtcaataatcgtgactagctaggctgttgccgatacatcgccctgagactcacgcttcgaaatctccccctttaccctttccctcgacttgctccttgtcaacgacctcgtcttgaaccttgttctcctctgccctcgcctccatctcgacctcttcaaacgccctctcgagatccttttcgtcaaagagatccggccccatcccctggacgtgttgctgcatcgcgggctgttggatggtctgttgaccgtacgagcctcccatgcacatggacattcccatgctaggtgcgttacccatcatccccatgcccatccccataccagaggaaggagggtaatatcccatccccatggcatggttctggttctggtaccctggctggtaaggctgaaacgactcgacctctctccccttgccctttccctgttgatcctgtccagcgccgaatcgttcgaaatctcccatccatgccgaattcgcctgtgcgacgttacgcatggccgacgatgacgaggacgaggtggaaacgggaccggctggtcgttgatgctgatgctggttctggttgaaatcgagcgccgactggaaagccgtctccatatcccccatgcccatacccatcccgagcctgcctccagcgggttgttgtctgaatcgaggttgaacatgcggggcggcttggggttgaaaggagctcgcccagttgttagctacgggttgttgttgctgctgctgaggctgaggctgaggctgcgactgcgactgcgactgcgactggggtcgcgctcccggtccaggtgagaatgccggtcggtccgctgtcgctctgaaaggcaattgccgggcaggctatcgagggtgaagtagaggttaacggatgagaagagtggatagaggtcgtccgggggtcgaatggcgtggtgtgaccgttcgatccacgcatgtccggcgcgttcgagccggttttcgacgagtgtttggacgtgtcgatagatacgtgccacgataccatttacgacaaagtttggcacggtcgatagacgaggagggagcatgggttcgaggtgccagaggaagagcaaaaggcccgtaggagaagccggtagcaatcgacggtaaaaggttggaagagggaacatgacgttagcgtaagcacttcttcacgacactgtgagacgaggagggtaaggggtacgacaggatgaaccaggtggtcgactgatgagatgattcggccagtctgaggtcgagttgatgggaagcgtggtgaggcgatacgaagtgaggtgggccatacgaaagccgacgtcaaaggagacggcacgggcgggaaggcgtcggatcatcaaggtgttttttgatcgcttcgtctttccggacgatgataccgcaggtaggagtgtcccaggtggtactccagccgaagtagagagtggtagagagagggaaggaacaggctcggtatcgaacgacgagacacacgtacctgcgcaactcctcctgcgaacccaggcgaaccagccgtgttcctgtcctatcatcccggcgtccccgaagacgaaaacgaaccgaatcgaacgcaaatacagacgggtcacacctgatcagtacctaatccttcctcgaatccacatcgcacgacgcttgagggactgaccctgatgagactcctatcgactccctcacgtttgaggatcccattgagcgggttgctcgaggccgaacagtctgctccaccgagtagtccttgcatcgcgtgtgttcggggtgtacgtgcgtgtgtgcgtctattcgtgtctcctcgagttgatgtgggtcagtggacagtcggttgatagctttgcacagtgactatagggggggtaatggagaagtgtagagagttgtgaatgtcccgttcatctcgcatctcgagccgctcgcatgtcgcccccggtcaaagcggcaaattagcttccgacgattgatcccatttacttccgaagccccttcccggtcggtcactcggctactaaactcgggccgggttgatgaaggggtcaacgactagtccatgatcaattgcatccgatgacgtaaacgctgagtgatgacgtatcgatccacttgtcaatttgcttccgatattcccatcgagagagccagacacgatcgatcttgcaaccagcacgacgaagtgaacgaacgacacaaactactacttttgacatcgtcgacctcgcattcagaccatacccatcgacccttccgttaccaaagaccacatccacacgcacacgtcaaacatgcctctcacgctcgaatccacccataccctgcatacagggacccagatgccctcgctcgggtacggcgtctacctctcggagcgcgacaagtgcgtcaaatccgtcctcaaggccatcgaggttgggtacaggcacgtcgattgcgctcagtattacgccaacgaggatcgtaagtctggcgcgcggatggtcgtgcatctcgagccggacgtgatgtttctgacaccgccgtcttccttgacagtcgtcggcgaagcatcgaccctctctggtgtcccgcgcgaatcgctcttcttgacgaccaagacgttctacgacgattcccaaaagaccgtcgacgagatcctacccgggttgatcgagagcgtacgaaagattgggaagaaccagagtggggagaaaccgtatgtcgacctgtttctgatccacgcgccgacgtgtggaccagaggggagacagttgttgtgggatgctttccaagaggtgagcgtgtgcgtcgtgtcgatcccagctacaactggataccaactccagttgaaacgctggctaaggggcacgtgctgacgctcgagcgcttctcccatcactatcaccttgacgccatccggtacgcctcgtacgacgcacttcgactcgcctgtatcgacgatcatagttgaagaaacaggggtacgccaaagatatcggcgtttccaacttgtaagccttctttctctcttccccgtgatagccgggagtcgcaagctcaacttgacatcgtctacctattaccctcacgtgctctctcgcattggaaacccatcatcactattaccgcatcctgaacacgccctctcgattcgccttggcagcggtgttaaacacctcgagaccctcaatggcgagaaacctgccgtcaaccagaccgaacttcacccgttctgccagcaacgcaaggttgtcgattattgccagcaacaaggtcagtccgcgttggctctggcgccagaacacggaccgtcttaagcccggtcagagccccaaagctgacgttgtcgtctgtgtcatggtcgtcattgataggcatcgtcatgcaggcctattgccccttggtcaggaactcgaggtcggatgatcccgtcctccaaaaagcagccaaggagacgggcaaatcggtcacccaggtgctcgtccgatggagtttgcaaaaggggtgagctttgcatggccatacagccgggtcgcactcggtcgtctggtcgatccggcctcgtctccactcagagctgatgtcagaccgctttcccccccacgcgcttcgctccagattctctcccctgcccaagtcggacacgcaccaggcggataatgccgacgtttacgatttcgagctttccaaggaacagatggaggcgattgacgggctggacgagggtgccaagggtgccgtcgcccctcacaatgtcgactgtccctaggtcaggttggtggagttgacatggcggacaatagaaaaaaacgagtgttgatgtagagacaagggccccgaacatcgttatagcatagcagatggatagattcgataggggtggactggttgcctggtagatgggggcgacgaacgtcgttaggtgaactcaatcggaatgcaccctttgtggggatgacattccatgtgggttcgatgagaaccatttcatcgccaatggtcccaccagcgcgtttcaatatttaccgatcatccgccatgtcatctgtggtccttatgttagtggcaaggtgaatcaggtgcgagtgtcgtcgtggcgctcgacgtcatgaaatccccgacgagcgaccacgaccgcctgcttagaatcttgacttcgcggaaagtccccacaaccaggaagaatccgtgacatcaagctcaagggacaggctgatgctcaatttgccccgtaacagatatggatcaacgggtcgcgctagcttgttactcggtgctcgtctcgtcgcgagccgatcctcacgtcgctaagcgttctgctgttgtgaaaccgttgggcaggttagttagtcgtcatcgtggagggtgcgtagatcgccatcgcggctactgcaccgtcatgcgggacgcatgtatagttcctaccgctgccgttggatgagttggagtagtagatgactgtctgcaacgtatggcccggcaccggagtcgatcgaaaatggatctcatctctggatgacacgtctagccggtcgacttgggtcgccaaactcgcgacaagacacttcctacgaccgcttcatgctttcgttgtcgtctccacttcgaccagccgctttgtcctaactttcctcgtaatcgtcctcctcgtcattgtcatcatcatcgcactgcgagacgcctcagatcagcgtgcgttgactagcgcgtgcagcgacaagaacacaggtctacgtacggcgctggtctttcttttcttgttctttggagcctcggctcccctggtcgctctgttcctggcagtaagactaccgatagcgacaggcatttgttctctgactttctccgtcaatgttgtaagatcaccatcctcattggatcattggtcaatgtgcagttcttgacgacgtcatccgtgtaatcactcttgctatgggctagctaactttttgaagcagataatacgcaacgaagaaagagcagactcacgtcgatcgtgatccggacatggcgtacgatccattggcaaagacgaggggagcttgatcgtcgaggtcgacagggagaaactgactttagagatcgagacggagaattcattcgcagaggtcgagagggagaaattgatcactgatgtcgaaaggacaacccgatcacgaagaaagagaggaattacctacctcggtgattgggtcagagatgaagaaggcattcggaactttaccttatactgctcccacatcttgtgtagctatactacaggtggatgtgctgatgtggcgatgatcagaaatgccatcagatagaagatgtcgatgatgccttccgtctgctagctgccatggagagcgtgcaggatggaactgtcgagtggcggcatctccaaagctatgctcggaagggctgatcgaccggatgctgatttcgctgaagtgaccatttgcatccgatcaccagtagagagacatcgcgagatcccggatctcgagttacgcttctcgacgattagacataatgaattttatcacccacagagatagctatcagatcgtttggtgcagaggttaacattctcgttttgggagactacttctgaagtacgagagatccccggttcgaatccgggaacggtccctcctatatttttgcaaatccgagcggatatttttctgctatctttttacctttgggtgacactccggcatcaatctcccaaaacgaatgtttaccactactctgtatcaaacacgccgttcaaacttgaaaccgcaatctgagtatcattccaaaagcaacaaagccgccgctcgcttacaacgccatcacaagaccgccgatccatgatggacaacaagaccatcaccagcggccgttaagtcgatctaggcgacgtgtcgccgtgagtagaccatacaacaatgtcatttgccaatttactgcaatagcacgtcatcctagacgatcgacgtgatcgtcgtcgggcttgccctttgttccggcccgtcaagtgacttgtcgagcccttcggggaagactacgaaaggaggatcgccgttcacgttgactgtctcttgttctcgctgggtttctcgattggtcgtgcttgtcaagccgagagcgtatatataccgacacatcttcctgatcctcctctatcctatgtcttcacgtcctcgctatctgttcttgctcaaaccgcgcgcctgataacatgactgaccccagcacatacgcagatgagtctgatcagcctggtcttgaatggagggcacggcgtcgggctgcttgcttcggaagacgggacaaggacggagacgataaggttcagaaccttccgaagagccaaacaccgtctccgtcagcatatggcagcaggcgcatctacttcgatggcgagggtcgtcaaggtgagctaggatcgtttcgggtgtgttccgtcactgatcgattcgtactcaactcactctcttaaattaccagccactcccgtcaaaccatccgcaccggtagactctgtgttgagcctggaagctcgtctgcccgaagaccaactgcaagggcgacctgagaagagtaagctgaacgcgatcgcccaaacttccgattggctcctgatgtactttgctcgcgtaggacgtaaatcaagtacccccgaacagaaggagacagacaggaccgacccgggcatctcagatcccagtcgtactcgagcgatggttgatgcagacaagcactccaatatcattaccggtagagacaagcatcagaagatcgacgcagttgaaacccgagaccgcggcgagactcagctgcgggaaattggcggcgcatacgagagatgtcccatcaacgagaggatggccgaggaggaggagggccgagggcgaggcgaaacccggctcgcgacggtgcagccgtcaatccgcggtgataacattcccaggctggcaccgcccagatacacggacccggtcacaggacgagatggtcggagtttcggtcggtgtgagtaagaatataattctccaccttattgagcttatccaacttctttatcagtcttcattcgcgacgacttgtaccacgagaaggagtggctcttccacaaggcgaccgggcatcttgtagtgccggtcgagggatctctgacggaatttccattcttgtaagtcgacgtcgtctttcttgtttggcgaatacttgctattcttgtccagcgaaatccagatgaccagtgcgctgatgatcgctcctctaactatcaatgacagcaattacgctttcaaaccccatcgggacagcctcaaggatgacgtcctgttcaaattgccaatacgttcagggtgctcgtgaatgtaatctacccattcaatcaagaccgcgatcatgccctccttgctccaggtactccgtggtttgcggggtgatgacccgaatttcttgggtactacggatagatatccagctaagcccccattgacgttgtgattggacttcctgttgaatcgatttaggaactcttccctgttctgatgatccaagttcgacaggatggctgtcactgcatcgtagtccgctggccagatgagagcagtccctttcctgtacgggaacagtgagctgggctgaacgttcaagttggatctagcccgtgcctacctataaacgagcgagccgggcattttgtatgtgaaaatgagggatgatatcgagcatggcagtaccatccataccaagcgtgatgaagtatgtttgttaacgacgtcagtacttcggtagagagcccatcgtctgattcgatcaaagtggtccaacgagtttctacgcgtttcgtctgatcggccaaaacatccgggaggcgacttccggaagtaaaatctctgcagtaacggtttcggtatcacaaacatggcacgtgcgagaatatatcaatcatagcgccgagtctacagaaactacgtccatcgtcgctgcgctgcagtgagccagaggagccagaaggaacagacgtgaagcggtcggcgggtcgtcaagaggtcgttaataagcggcggctattcgcctcaggtcatgtccatcgtgccagtgtcgtaaagactctcggtatccatggacggcatgccttccttttcgtcgtccttgtccttgtcctttggtttacggcgaggaatgttgccggcgttccgtttcgcccatcgaagaccacatgcctgtgccacaagagatgccgaggaaatcagtatcaggtcatctggaacggtctcgtctagctcgtgactcacgttgcagagcgtttttggaccgagcggaccctatcaatcatcgatagtgtcagtcaagcagaggtcaacggggacacgcgcttgcatgggcttacctttcgccattctggggagtcgttcctgccacagttgcgacagagatattctggattcttgctcatcttcggtttcttggcctttttgtcgtcgaccattccgccacccatctggaacgattcgtttgtctggaactgaatgttctgcataccaaccgggccgctcgtcgatatgttacggagcgacggcatcgggcgatcatcgtcatcatcgtcgtcgtcttcatcctcgtccgacgagttgaggttgcccatgtaacccgaattcatgttctcggtcttgctgctagacgcagattgtggcatcgggttgtattgactgacggattgacctacagaacgcagactttcagcaaacggccgaatgtgctccacgagcctaacaggcttacgagcagcaaatggacgagcttgtaagtcctgaagatttcgcgtaatagatgtgtgcgtcagtccagtccattacggccgaaccaggctggacgtaccctcaactcttgtctcaacctctcattctccatcttgagctcgaggaatgaatcgagcattttagcccctccatcaccttgaccttgccatttgcgccccataatccagaacgctttgcaagaccgctcatcgtcgtcatcgagtcccatcccgcctccgatccccgcctggaacgtcctccgctgtgcccgtgtcgtccccatgacgccgcctccatcgaaaccgccgttgctaccggacgagtcgggcgtgccaggttcatcgtaatcgttgcctgcgggggtgcaatgataccggtaagtcggtgatctcgcggcggcatgacagtgcacgacctagctcaccaaagtacggatgacctctcagctcgaacagggtctctttgccatctttggtgaccatcctcgtgtacacattgagcgacttggacggtccggcgaaattgcccataggtacactggtcgatacggtcggggggtcaaacgccgacgttctcgaactactgagctggtaatgacgttgttgcggagacgagctcatcggttcggtaaaggaagcgatcgaggcgcgaatgttctgcatcaaacgggccaggtcgatcgctgtcaaagtcgggtaggcgagaaacaggccatcagcaattggagatcgcccttgcatcgacccggttcggcaatgactgccactcacgatagacgaaatccgcccaatcattaccctcgatctcttccggcttgtatcccaacaactcgtgcgttgctggcgatgcaaagatgatcttccatccactcctgcctcgacctggagcggtctgcggagatgaatcgtacgggatcaaacaccataccgccgcaccgaccagttcctgcatcaagagctgcggccatcgtttacgtttcataaactgggaatgagcggggaatcagccgccagccgcgatgcactcgatctccactcgaccgggacgactcacctcgaacgtctcctgatcgggtaccccaggcatcacattggaccctcctaccgtgctctgcccggccactgtcccaggaccgcctgacatgccgccctgatcgttgtaacttccgatactacctcccggactcgctccctctgtctgtccgcccaggcccatacccatcgggatgtaactatgcgggttgttggccatggcggaaggcaagggagcagccatctgcccagcctgttgttgcatcatgttcatcccggaagcgttactcatgctcgtcgtcctcgcctgttggaccgcctggtggtccgcggccgtataccctgggacgtgcatgccgatggtaaacgggtactgggtgggcacgggcgagtccccgaacgcatccggagcttgttgttggatgtacgaagctgctacaccgggattcatggcgttgctagagttcacagcgttgttgttgttgttgctgttgctattgttggcagatgagggcgagttgttgtaaaacgttcccgacgagttgcccggtgcaggagtcatcggtccgctgggttgtgcagagcttcccgaggacgaaccgcccgaagagctgttattattggaaggttgggtggtcgtctgtttcctctcgtgagcttgaagctgctggcgtttcttttcaggcaactgcagggacagtcggaacggtcccgagcccgattgaggtcgggattggtcaggtccttgttgaggcatgtcctactggaaggatctttgacgatgcagagggttcaacactggcagattttgcgatggttgtgagggggatgtactcgatcgaccgatatgagtactttctggtacgcgcgaaccagctgatcaacaatcgttctgcatggagatcaatctcgcgagtccatgccacgcacctttcactcggtacagaggtccggtgtgtctgatgaattcggcctttctgcttgatcgactgcaagatcctcgtattcgttcgtcgtggtgcggccggcagtcgattgatcgacggggtcgctcgagcggaattgacctccgttttccggcgtcgagatggcgcgaatcgacgagtcagtcgggcggggtttagcgtcgaaaccgatgcaagacccaaggttcgatctcttggttgactgattcagggtgtagatgattgtgactagtgattggcatggagaacttgacctgatgaaactgctaaacttactctgcttgtattttgctccattcccatttgcttgagtgaaggtggggtggttgctcttgggtgaacgctcgatcggaatcgagatcgggtacgcgtgagaaagcgggaaaagcgtgcatcaacgggcaggcatcatcgagggattaccccattcgtttcatcgtttcatcgttatcgtttctcgtatacagtgtgccgttacaacttgttgcttctctctaacatcatatcagatgacatcgtaaactaccttactgcctacccgccaacctcttacatgaccacctgtgcaaaattgccatacagcgcgtccctgacgtgatagtagacgtccccgacactgccttccatctcgatcttgccctcgcccgtctttctcaccgcgaccacggacgatcccataccgggtcccaacttttcacccttgagtagcgtcggtacacctggtccacagataagcataccctcgccggcaaactcggccgggatcgacatgccggataatcgagtcttgagcgatgtcaatcgcagatcgccgatgaatagcgtctgaggcaatgatactggttcatggcgcatggccgctgctgtcgtcaccttgcgttcaaagacgggtttgtcctccacgtcgccgtcgacgttcatcgcctctccgtcctcggtcttgacgaccgtattgacaccgttcgaagcctcggcgatggcagtctcttcatccttgatcggtagctcaagcacgggtatactcatgttcgcaccgacgtgcaccttgccgctaaccttggccacctcgtaatcctcaaactgttgatcggcgggtcgaccatcaaccatcgatctcgaaccgactgtcaccgtacgagactcaccttggaccacctgccctgtgcatccgtcatcaacccttcactgagcgagatcgagtaactctgcgtctgttctccgatcatgacctgctcgtagtccgagggcgccatgatctccttggtcaggttcgtaatcgcgtgtagattgatcaagaggtcgtccgtcgctgctttatgtgaccgtatcaaaatctatagggtacatgaaccgtaccaagttcacgaggtcaggtgtgcctagatcgtgataggatgctgaaaaactcaccacctgacggggatttaactgcgggacgatcgtcttgatcgctcgcccatcgtgttgaccttccatatcgacgtagaagatttcgcagcccacctcgacctcgagatcctcctggacgtatttcgaaggtggttctggcggttctttctgtcaatccgccagagcgaggcgcgcatgtaccaagacatctttatcaatagcctgatcatacttgatcgacgttttccctactcacggctttttcctcttcctccttctgcttcctcttggcctccttgacttcgtcgctctcattatcctcctcgatctcttttccctttctcacccaggcgcctacgtcaatcccttcaccgtagacatcgaccctccttcctttccgttcgacaaaggggaacatcctgaatctcgctagtcccgcttgagacgagactggtgcattcttgaagaatcctgttgaccggacttgttgtcccttgacgtaaatgtcaaacgacgtgttcctgacgtcgtccgtgtccataaaggggttcccggctcccgttcccgtagctccaataggtcctcccatcatcggctcgtcttcccgtgcctgatcgtccggacccccgctgccatcttcatcttcctcgtcgtcatcgtcagaatcgctctccaagtcgtcggcttccaacatccgccggctcctttccttggcagcgagcgcggctgcttctttctctttttgcatcctctcggcctcgagatgagcctccaactcgtccccctccaaagcgaccttgtcgttcaggatcaccttgatcttcaccgttcccccctgctctccctcggtcaacctgatcgggaccccgacctgtccctgtccgtaacgcgagtcgccgatctgcacctcgttccaccgctcgaacaattcctgcgctagcgtccccgattcggacctcccggtgaggacgaccttgcaccccttgtcgcctgccatggtcgcaaacaacctgcgggagtatccataattcatgctcatcgggacggccaggacacaacgaggtccaggcatgccctgaagcgcggggtccgtctcgtacgctgtgaccgaggggtaaaacctgaggtgtttgaacctcaatgcgcctacggtccctgccgcttcctcctcccgtgacccgggtgcaccggggggcggagctcgttttcttctccccggtccgaacccttgtctcgcgttgtcctgtgcactccccagtccttcatcggtggccacggtcccgcccatccattccatcaagctcctggccaccctgaccccttcctcccccgttcggctgacgaggcacaaggggtaattccagacccctcgcccttgtacaccaccccgttgccctcctcgatgaaattgagattgcgcttgttggtacgcccagtgctgatcgaggagtaccaggagctccaacaacctcggcgaaggatccacggggaataacaagttgcccccttcgtgtgacaaggtcctggtgatcaggccgagcaggccggcgactttttccttcatcttgactcccttccattggctcctcccagcttcgacgagcaggagatcgggtctgccaagtccgccctcggagatgccggtgctggagaggaggacggtcccggacaggtgtcgttccgatgtatgattgatcccgagggcgtacaggagggtacccgaggtgggagatctcagcttgaacagggatcctccgagagtttgaccggatgggtatggggtcaagaggaggtgcgacaagagacctgtaggtgagattcgggcatcagttgtcggtgcgattgaccggcagacctcggcttcattccatactcaccgctcagatggatgggttgactataccggaccgccttgatgtggtcaaacgcctcgttgatctcttccgccgtacagacgaacggcccttttagtttccgctcgtcggcagcttcaactccgtttgtgtctgatccctgaccgggctctttcgtctgagcatcgtcctcgacgcgaacctcgttcctccacccgaccgcttcttctaagcatccgagccttccgatttccacggtaggctgggtaccatatactggacatttaaggccccagtgtgtccgcgcgtatggatagagtgatgtatacgaggtcggagaatgagaaaggagtacgagatcgatcgtcggtgagatcctgttcaggcgagatcaagccgagattcagcttcgatttgatcacagggaaatgatcaaaacggattccgagacatactctttgattttctgctcatacttggtgtcgtacccattttcgctggttcgtctggggtcattcccaccgagatctaagaggatcttgacgtcgtcgagttcgagcaagtagctcacgggtcccgtcgagagtgacgatcctggggtctctgcggatcccgtgagaggggtgaatatgatcatcctcggacggcgagactgcgatgaggcaacgtatggtcgagctgggtatagcaagtttcaaaagtacatcgatgtgtgcaaccaagttcctccaagttgcaagttgaacctcgttgaacctcgttgtcgaggtaggggcgacgtgtattttggaaggggaccggatgtatattacttccggggctggacagggtcggaatcaaatttgatcggatgattacgccattttcgtatggtttgcttccgaaggcacggaggttcccgcaaactcccgactcatcatccatcaacatattcatgagtggcctgagtggtgacgctggaaagatggtcagtcagctcatatcatcccgttcaagctcagtaccacaacaagatcctggccacgaataaccaaggtaaaccttgaaaaaacaaatcgacgactctgacgacaatgtcacccatagcctcctcttcctcgacggctccgaaatccatcgtcatcgtgggcggcggtatcatcggcgtctgcactgcctactatacctcgatctcgccacgattccagccggccaagggcgatactatcaccttggtagaagccaccgatgtagccagtgcggcgagtggaaaagcgggcggattgttggctctcgattggcatggacaggcgaccgccagtgagtccgcgtcggcatggtggcaacgcaaccgacgaatgagaagaagaatagaggctgacgaaagtcatcccaatcgatgtttttccgtaccccggacgcttctcacacaggtctatctgccctttcttacaagctgcacgctgatctatctgctcaacatggaggtgaaaaatggggttaccggacggtcgacacgctcgtaagtttcgtaatcgcttatccacgcatgatcatccccaagctcgactcacgacccactccgcctcttcctcctctctctccaccgttctcagagcgtgactaccgacttgaccgagcggactaaacgcaaatcccctatcgattggttacccgaggggaccgtgcatcattcccgtcccctcggaacgcaaaagacgaccgctcaagtccatcctcaactgttcacgcgggaaatgttccgcatgttcttggaaagaccgggcaccaaggtcgtctacggcagtgcgacccaggttggctcgtcagaatcgggtcagaacagcttacgagttcaagctagggattccggggagacgtccgacttggctttcacgcacctggtcctctccgccggaccgtggacgggtgcattgtcgaagacgctattccccggacctggcacgaagaagacgatttcgagttcgagctcgacctcgaaatcactggatctggccatctcggggtcgagggcgcattcgatcgtgctcaagacggatcgacagttgacagcgcacgcgttgttcacggatatgacgctcgaggatggggacatggccgagcccgaggtgtatgctcgaccggacgggacggtctatatgtgagctagaacaagagtcgagatgtgtttcttcgcgcggaactgactgacgctcgactgtcttcccgctttgctcagctgtggtgcatcggacaacgaaccccttccgaagctcgcctctcaagtcaaacccgatccattcagcatcgaactcttgcatacccaagcctcggcgttgacccccgaattctcatccgaacggagcaagacgatcgccgaacaagcttgtttcctgcccatctcggatcgaggccgacccctgatcggagcgacggccttgcccggggtgtatgtagccagcgggcatagctgttgggggatcacgcagggtccagggaccgggttgatcatgagcgagatcttgctcgagggcaaggcaaagagcgcggacgtgggcaagttgtcaccctgagcgttaaatgatcgggcattcgggaaagggatggatcgaaatccaagacgcaagatctagatagagaagttgtatcatttcctacaattatcgttcatcgcgattgcaacctgttctggatcccgcacaaaagggaaatctggtcccttcagctcggcttcacttcatagatacttgaccttactgaccaacagcattattagcgaaacgtcccgatatgcgtcggcctgcgagcacggtaaaggcaatcggcatcatcgtcgacggttgcctcgatcacgggtcgccaaagcatccgataggcaagctttgaaagcgggtttggagcaatagcatgctgcacgaggaggtgcaccacagccacctgtccagcttcaaatctggtcgataggcccggatgtttcagataccgagtcccgttgtcggcgtcgagaccagcccttcaaacttgtgtcatcttgacggcaaaatccttgctcagtgcccgccacgaggactttcaggcagctgcctctatagaattctgcctgagcgcggtgaagatccctgatcatgtgatccaatgcttcccgcagatggccccgttcgactcggataagtattctcatcgctgaagctgcgagcgcaggagaactttgtctctccgcttggttgagatcgttcgagattcacaagcgcagtgaccacgtcaaaatgtgaggccgagaacgattgcaggtccgcatcttggctatttgacagcggtcagtcacaatctctgtgattggtcagcaagtaatctgcattgatagagtcgaccccctgacgctcgagtcggagcagtatgctttgcaacatgcccctgcctaatcctggaaacttggctgcgttgtcgagcgcaagtagagctgttttcacaagcctgtacgacagacgcggttgtcgggcgacccggagggagtctggcgttcgagtcatgtcgtatcgtcatcaagaggtatatcgaaacaacgaagaggcagcaaaaggtaaaacgcatcacgagctacccgtcaggatacaccttctactcgcataacagcatgttgccaaatcaagttcgttagcagcctcgcctatctcgataaccaagacgggctggcgagttgagaaattctcgcgagatcaacgcagggttcgagcttctcaatcgagctttttgctggccaccgactgaggttgcctctgcataatcccgtcaagtcagccgaccggacccagcaacgtcagaataatcccgccttcagactcaccgaatcggccaactcgttgaaagcgttaaagttctgtccggcctgtttcttcagggcagctacaaatacgaaagatttcggttagcagcatgatcaaggtctcgagcaggaaggccggggtcgacttgccgagatcacggtccttggcggcgagctgttccttcaaggtcgatacttccgactgcaacgacttgttgggtccagcggcgacggcagtcttcgaggtctgttcaggtgaaagcaagatgtggtcagtcttacgcaacagaacacctcgatagacgggagggtggacggccagactcacgttggtcttcaaagcattaagttgttcttgcgacatgatcaggtcgagtacgatggcgaagacccgggtcaggagtacggccaagaacagagtagctcccgtcaagtacactatcgacgtccatcgacagagcagagcggagtctccatcagcccatggtgctcgtgccgtgatgctagtccctgccaacttacagttcctctgcgcgtaaaactttctagcggcgtggttggtctcgacccggacgtcttggactcccttttcctgcttggcagtttggccttcctgagcgaccttgatcatccgctggacggcgtctacgaagaggacggcaacaaagctgcagcaaagcggagaagagtaggaggttcagcaggaagtcccacagaggtcataaagagtgcgacttgtcagggctcacatgaaagtgattttcaactgatcagagccggtagtccagccaaagggaacaaacgatgatcaatcggccgaccaccttgtcacgttgatcgcagcctcgactcacaccatactggatcttggcgacgaccggattctcgctcaaaaaatgcatcatcctacgtggcacggatgatgatagtcggggtttagcaatactcgggaggggtgcggccgggccgaggaggaagaaaggaccgactttttcttcatgacaaaaggcatgggacaaacgatggctccgaagagcgccaactctgccgagagaagcaagaagcagactatcgttcaggcaacgaggaaggtgtagacaaggtcagcttgtctctgtatgcggtgctggtgacgagggtaaaattctacttgctagtgtaatagagctatcgtttcccaaggaggcggttgtcagccggcagtattgggtgggacatattgataaatcgaactaaccgtcattgttgagtagagccgttcgtagggttgtcgtcgggtacgatatctgagcttgtgaattgggggtcggcttctgggattgaagtgaatggtatcgttcgactatcgtatgttatcgccttgatctgttcctccacgtcgaaaggacgggaatgctgatgaagagccagggcaacctctgcggaaagacgtgacgtcacggcgatcaaagcaagggagcaagatgcgcgtcgccccagcatcacacagcgcttacggcatgcttcgttgatgacaatttatgatgaattgatcaacttgcaacttgaaacccgttcggtttctcccctcccacgctgcctcgtcgcgctgttgcgccccatcaatacttttgatcaaatgaatcaaattccatctttcccatcttgatcgcaaaaattcccttctgctagaccttaccgattctcgtttgagcctcatgctgccgcggcgagcatgtcgtccaccgatagctgacaacgtcacatgcattcatcgcaacccggtgagatctctaacgactgagcgcaagcaaactctcagcagtccccccacacggcttctagaagatcccggttggagaggcaggcggagacggccgcgattactccgccttaccagccggcacttcatcaagtactacggccaaatccgatcaaccagctttctatcgatttttgacctctcgtcaggtctgaaggggttcctatatcctgattacgatgccgccctcaactcccccggatgatactccagagcctcacctccgacagacccctacaaggagctctccacagcacaatcctcgagactggaactccgtctatactgaacgttccattcattccttgcccgaggaggagattgtgagagccggctcggatatcggaaaggtaccttcagtggacgcatctgtctctgcaagatcgtctgcaaccctagactcatccgggacgacaagatgtctgccttttcctacgtctccttcaaccgcctcttcgcccatcagagctcgatcgcagacacagcctcaatcaccaaggcagaagaacctgcctgaagatcactctcgaggcttacgtttcccttcactcgaccttccggtaccttcagatctgcctacaagtcctagaggaccaaccaggatctaccccaggctcagggtgaacagcgcccatgccctcggaaatcccggtccaggattattgatacgacacccatccgcgctgaagaacgagactggactccccacttctcgctcgtcttccaccgcagggcacgtacggacgagtaccgcacctggaccgaccgtgccaggcttgatgctgcgttcagggttgaagatcagtacaaacttgccacctctgcatgatggctccgaaagccctgcaacttcgcctatcaggatgagactacgtaggagtcgaggtgaagcgttggatgcggacgatctggttaggagggggatgagagccgttaaagcgacaaagacggtcatggaggttttggagagcgaggagaggttcaaggacggtctgcgtgtcgtgatcgaggttggtcactcctagcatggacttttcgagcttgatctgatcgaatgagtcggtacagctgtttttggaccccttgatcaaagaagtgagcggtgggccgggaatcctgacaacacgacaactcaaacagctattcggcaatattcgggagatcgaggcactcagcgggcagatcgtcgcggcactcaaagagacgatcggagacatctcttcagcagacaatgccacagcctttgtcgaagcatcgcatacaaagagccgagtgggacagctacaggtcgatcaggagcggcctcagcagaccttgaccaggagtacttcggcacctgccctctttcagccagctctgggtcgtatcccgaagatcgccaacgttttgctttcacacctcccctacttgtcgctctattacccttacatcgcagcattcccctcggtgccttctacgatcatcgtactgtgtacgcagaattcccggttcagatcgttcctgcacaaaaaagaacaagaccctcggtgtaaacgtctcggattgtctcattggctgttgacggtcgtacagaggatccctcgatggacgatcctcatcgagaatctgatcaaagtcacagacgacccgatcgaaaagcaaggtctggcccgagctcatgggatggccgaaaaggttgccgagaatatcaatacgaggttgagggagcagacggccatgttgacgttgatcaacctacaaaaggccttttcgggcttgtcaaagccgttggtggcacctgctcggagattagtgcaaaagggcgagtctagcatgtcatcgctaccttgccgcaaactgatcggattgtacgctaggtcttctcaagcagaccagtctcggtccttcagagctctggttttcctcttcaacgacattctcgtttgtgctaccggcaccggcggaacctcggtgaccattggcatgctatccaattggatctacacggccgagggttctctaactgcattcgcctcgaatatggcgcatatgatttcgaatcaacgcggtagcgacaacgagttcgccgtgagacctttatcgtcatcgtcacctcgacccactagtatcattgagaattccttcgagtgcatcgcgtgtatcgaggtcgaggatatgaccgtgttcggtctggaaagcgatcggaacgtcgacaagcgggaaaaagcttttcagatcacgtcgccgttggcaagcatggaactatcggcaggtcagtgcttggcgtttgcgacgtgagaaattcttgaatgtatccaactgttttgtcgttctgcagaaagccgggcggacaaggaatcctggttgatgtcgctcaacgatgccaaatatggccgcctagccgatcttcagaccttgcaacagaccgctacgatccgacaatccaaacgaaagtctctccacgctgtgtctcgtcgatcgtcctcgtcagccttttcctacgctcaagagccgcaagggatcctggaagaaggcctggtactcgaagtcgaggtcgccgggtacaattctcccgtcgtacaagatgccacaaagtcggcatcgagcgcctgtgtcaaatgtcacgcttcgttcacgttgatcaagacgcctcaaccttgtttgcttgcttgcggcaagctcttttgttcggaatgcctgaccagggtcggtatcaggctcgattaaaccccgttcgaatggcgatcgctgacagactgaggcgcgatttcaatgtgcccgtgcgtgcagacctttacgatcagcggggaaccacgaggaaagacccgtcgagcgtgtgagagttgctattatgccatttttagaacatctagcgggacggagcacgaagtcctggatacccacgtcaactttacgctctcccggcagtcccgtgaggagattgggagggagagacaaggatcggcggtgagcgtgacgggaggctcggccttgtcgaggacgagtacgagcgccgggtccgtcgatgtttccatggtagatctcgtcgagcaagagcatagtcaagctgtaaaagtgttgagaggtgagtctttctccatgcgagtgattcgagactgtgtcggatgtttccgtcgctcatgtttcgccatttctggaagagcttttgaagcgatgaaagactgccgggatctggccacgaccgactgtcgatcaagcgattctggctgggtgattggttctcgtatggtgatgtactgaatgtcacacggtgatgtcaaggcttctagccagcgtcgtctttaacgaggcggtcaggatgaaacgggataagggggaaccggtgacttatcaaataaagataaggtcgtttatttattgccacgtcagccaagccctttattgggtcagtcgctaagataatcgtcatcatcatcatcatcatcagccccgcctcccgcacgttggttcctcctctctctgccttcgttgttgttgttcactcgtcacccacccccccacctaaccctcaagaaaaagaaaaaagagatagacatctttgcaaaatggtgagcatctcgcccggtctacacgacgaggacgaggacggacgtcggagaagaaagggagaagggctatggggggagagacgaatgcagagtgaaacgggtggacgaggtgtgcggggtatgcgtagacgtgtgtctggtgtgatgcgtacgtgcgtgcgtgcaaggacgtatcggcatcaaggaaaaaggacacggatcttcaggaagacttctgtctccacgttaggacgctaggacgctcgacaggaaactctgaacgaaaaaaacgaagtcgacgatgccgacaaggagctcgtatccggttccatatctcggccggaaaagggaaccgggatgaaccgacaacgactaaggcagaacgtccgactcgtaccgcaaccgcccagttggaagacctactcggccttgatctcggcgggcaagtttgcgacctcccacgacgacgagtgccgcagtgtggatcccgacatcgaccacgacctcgcccgactatcgactcgcccttggcaagtcccacgggtgacgatggcggtcacgataaacccattctcaattcaccttggagacttgccggacgactactcgttagacattcactggtcaacccacctttgaggctattcagaaccgaggcattgctcagagccagcggaggacgaataccacatctcgtatcacttgtcgacgcacctccatcaggccgatttcgactatgaactgaatgggatcataccgaagatacgacactatcgcactggtccgccgcatatcgacacaccgccgaccccgacctcttttcgcacatcagcacgcacgcacgctcgcgcacatacacacgcttcgttcactttcgcacacacgcacactctttgcttcttttcatctcgttttccttccctctccctctctctctctctctctctcgtgtctcctcgcccttttgaccctcttccacacttcgcccggcatcttgcgcaaacactaacccttcaccccgccttgcctcgcctctcgacaacagggtcgtgtcaggactaagaccgtcaagaaggcttccagggctttgatcgagaagtactaccctcgtttgactttggacttccagtgagcaaatccgtcattaaaatataaacgaaccggagctgatcgatcgtgcggacgttttagcaccaacaagcgaatcctcgatgaggtcgccatggtcccctccaagaggttgaggaacaagatctctggatgtaagtctcgacttgcttgcttgtctgcacacatcgtcgtacctcgacgctaacgcccgggcatccttctcctcgccgccgtcgacccgtagtcaccacccacttgatgaagcgaattcagaagggacccgtccgaggaatctctttccgattgcaagaggaggagagggagaggaaggaccagtacgtccccgacgtctcggccttggaggttggagagaccggtttggacattgacgccgacaccaaggtgagtcgtccgtctcgggcgcgcgcatgtcgagcacgcctagcgggaaagcggcctggctgaccattcgacctcgatgtcatcttcgacgcccccctgtaggagctcctccgatccctcggattcgacggtgctatcaacaccaacgtcgtcgccgtcaccggccccgagcctacccgtgggaagcgatacgtccccggtgccgccaactaagcgtccacactcgatcgaaagggaatcgagtggtcgtcgagggcgcgcccgtagctgtcgtcgtcggtctggatatgataccataccgctcaaattggatgtggaacgccgtgttcggatcgaggcccggtgggggtgtagtttcgatggtcgttgggaggtggtgttggatatcggatcgtgtgtgatcggctgctcatgtgtagacggagacatgcaatctgatgatggaatacgcgcgagcgatacaaaaatccgaacagacgagacgaataggccgtgagaacgtggtccgtggcctacttgaacccgtcctgcgtttcatgaaggaacggtaaatgaacgaggaacgagcactcattgccgtcttcgggcccctcccgccttggttgtgccctcgccactctgacccgcggacgtccttgacacctgaccacctgatcatcatcatcatcattggttgctgatgccccgagtacgatatgcacagtagcgaccatggtacgctcttggttcgtagtagtacggcgaaagtatgtgtgatgatggacgcccagcccgatctctggaccttacggtcaagctgcagaacgtaagcgggcggcgatttctcctctccctctctctcccgcttagctttccaggcaccaagcaccagtaataagagaaaaatcactggcactacgtcggctagcgctctcgaggttgcacaggtcagtcagtacgccccgaaagttttggtagaggacactgactgcatgactgattcgatgtttccggacgtttcgttcagaagtcgtggtgagaaaaaaatggtcttggtaccctcgagtatgtttgctagacacgtgctggctatggaaggccgctgcgtaccctggggaacgcgaaaagcatatggcgtccgaattcggcaaggcaatcaatgcagtcaggtcggctgtccgagggttacaagattcacattcaagagggtatatccagctatcatcggagcgaattctagcatctatctacgacttgatgacctccttttcgataaagtccttgacggcctgccagtaccccggctgagcataggtatcgtctgccaaacgagccccacagcaattcagcgaccgcgccgactgaaacaccacgtctgaacgacgacgccgtcggccttgccgactcactgtgctgtccgttggcaaacaatttccacgtgatcttcccacccgccttttccctcaacttcttgtacatgggcatctgcgtcgaatgtacaatctcgtccttggcccctacgagcgccaagaatggcgtctctttcggtatcgagggagccgagagctgagcatcccatttctcgcgcaagaggaacgggatatgaaggaacgggccggcgaggggcatgacgaatgggatgagggtcttgagggaaaagggagcgttctcgatgataatcccgtcgacctgtagcgacccggggacgtttcgtcagctcgatcaaacggtttctcatctgcataataccccgagtacgggtgttcaccttgtcgccattccgactggccacgtcgaccgagacgcatccaccgatactctgtccatagacgactactttcgtgcctttcaataacgggtgcgcgcgaacccaatcgagcgccgtctgggcgtcgatccggagacctttttccgaagggatgccttcagatttgccgtacctgtacaggtcgaagcaaagttgtcagcctcgagggacattgcgggaagagtggaaggagttgtcggcttgccctcggtaagaaagcataaagacgttgcagtcaatgctttcccaaaacactcgggcaaggggtaatcgatgtcccatgtttcctatgattgtccaatagaaagttcaacgttctcttcccttcgggggtgcgagcgggagagcaccgtaaagacaaggcagcgaggcttaccggcattggcatgatacatgatcaccgtcggccgactcttgacgtaatcctcgccatccttgctgagcttgccctctgcagccaccggatcgacaactgccttctcattattccccttggtaccttgtttggctttcgccgcgctgcgaagggcgagcaggctcttgacttcaaagggaggacgagcggggatgaagtaggccgctagggagaccttgtccggggttgtgagggtgacagaagtgtacgggattccaaagagggtgtaaggatccggcacatctatttcaggaaggaaaaggtaagtcatgtatagataggtgcaggttgggtgaggaggacttgcctgttcttgagccttcggggaaggcggctgggtagagcatgctctgctggtaataccatagtcccgctgctgtcaagccaacaacagtcgatccgatatatgccaggtactatatttccgagggattcatgagttgagaacggcactaatgatcgatgccgagacataccttgagtaccggcaatgtcgttttgggataacgatagatcatgtagctcgcgacggcgagaccgctcgccaggttgaccttgaaaggggccattccgggtgatcgcaagattgttcgatacgttcaagacaaggagcgcttttctatgggtttggtcagaatcgcaccaagtagcagtggtcgaggtgactgtcaaaggtctagttgcacacctagaccagattgacaatagggctcgatggtagctcgggaaacgtcttacgtcatcgagatctcaagtcgctggtaattaagcgcagccgagattaggtaatatttgcgcttctgtttgggtcacaaatgcaaccccccgtcatttctcgggtgctttcgggttgatccgaagagcgagaaatgtcgaaagatggcgacatcgcatcgagatcatcgaacgaaagggatagtctatacaacttacaaccggacttatcaaccacttggatcaagcaaaataacgagctataaatcagacatccagatctacgtcgaggtctttagaagaaaagcccgtcaaccctcccccgacagcgtattcgtatgtgaacttcacgatcgagcctcgaccaagcattactaatcaacccgtctctcgccacatccgactcgaccaggattcccgacattatgaccaccatagtcgcaccaccggcagaagcacccaaggatctaaccgcatctcaggcttcgaacccgctggtcaaccctttgaaccccaaggggatcaagccgtaagtcgtcccctggccgatcctccacgtctacactgctgccccgagccgaaactcatgggttgcgggaatcccgacctcgatcttgcccttattttgctgtcgttgttacagatgctgtgcatgtcctgagactaaagctatccgtgacgactgtttcctccggaccgacgtcgattccgcccaagtggactgcagggaattcatcgagcgtcatcgagagtgcatgaaggggtacgggttcaaggtctaggtctaggatacgcttgcatccttcttcttctctgccgcgccgcctagactatctctgcggctgtatcatcaacatcgagaccgaccaacataatcggacgcgagtcgattcgattggactcgaccatccataccactactctccgtcacttcacatctttttgtatctcacttgcatgaacaaaggacgtcggtacatcgtacaaatgttgccaatatccttcagggctgcggcatcgttccgactacaatcaagggtccagcgggatctcgagcggacccttcgagcaagatcatctcgaggatcaggaacttccggagacttccacatttctgccgagacatggtcagcgaagggttggcgattcggaactgggtgcgatcggggcacgttacgcagatgacgacatttgcccagttcgaccagtcctctcgaccggtcttcccatcgtacagttgttgcaaggtatcataggtcgagtcggtaagcggtataggtctcttttgctctgggatccctagtccccattcgatactcgagctgtatgggatgtgcctgagtttgagcggtgctgcagatcccgactggtcatggggccacgagtgagcatcagctgacaaagtcgggagacgctacgcgtttcgtttcatttgcacacgatcgactcacctggatgtagttggctacttgctatcctcagacgaaataaaagaccaatgcggtcagaacgaccacgtgcgatcgaaccgatcgaatcttacttgacgctcgaccatcccaaagtttggttgctcaaggtaccaagaattgacacaactttgagttatcgacacaagggtcgcgatcgagacggaatcctgcaactgtcgaggcgcaaccgttttgggcacacaccggccttcgggatcccacgcgggagccccttttgtaagcaattggaaacgtagtgacgccttcgagacagcgcattcggctagccgcgtagaacagtaccactcgctggtcgatacgttggccaaggccccatctgcggaccattaggtcatagaattcgacggggacgagtagccggacctattcgaaggactttgcgatgttaatgtcagactccgccctgatacacgtccatatagtcttcttgtattcgatccctgactgccgtgggaattctctttttgcgaattcccgctcggcgaagactccgtgctgaagctgttaggtgggaaataggacgggcccggtggatcgggatccgtataatatctcctggtggatgtaggttcagctgacatagtgatccggagggattctattcgtacttgcgagtcaaattgaaatgcggctgaatagaaatactctgttcaaatagatctcctttatagctttccacacgtcgagtacgagcgagtgtccacctgtcaatgaccagctccctgtatgtaccatcctttctcaatcacgcgacccttgaaacgtatagatactacaaccatagccacagccttgtgctctacgacgcgtatcgcatccaatcaaaggggtccgtcgtgtcatttcactgtgagtggatactcggcgggcgcacgcgagaaggaatagcgctgtatcttccagatggcgtgtcccggattttacaatacatgtggatcggtaatactgggattagatggcctaacgataagcatacatgtttcaaaaccttccgatctctgcaccttcttaatcatgtccccaccaacgatcattgtggatggttgcactcgcctggaggtcttttcaggaatcatctctgaggtcccctctgcaagtaaacttatctcgagattgacagaaaacagcgctggagcgccggactgattcttcatcttagccagccggatggacgggttcgctatcctaacgcgaaaaccacaaggcatgccaacgatgaccactcccgtcatatagctgattccgtagggacgtcgatcagtgaaattgtacatttcgattgtgctgaaaagacgtttcaggcgatcagtgatctgcgcccggactattccggtctccacattccgttgttcagttgacgaatactcgatgtacgcgctatcgccagtataagtcacgctgaagtcttgaaacgagccgagttagcttttcactcagcgcagtacgcggcgaatgatcgagcccgtggcactcacatcgatatgatgttgaatcgacttctcaacagattggacggataagcagtgggttgacgcatatcggctcggtgaagcagacgaagacccacctgtacggggttgtttcccgcctgctgttgaaatttgaaccatgctcgtaagaatgctgccgaagcagagcagagggtcctcacacgatcctgctgtgtccagtgcgccaaacccctgagcctgtcctcatactggctcaggtgtttgcccaatggcgcatcatctgttgtccatatgaaggaatgctctttagtctcgaaaccgtctctaactccctccgtcttggtcagcatcgaacaagccttagtatcggaattgggttgggtgtagcagtggccatcggttgactgagacgcatgcgaccatggcgatgttctggccttgtgttcattttttaccgagcccgccgaatcgtacgaccgtccgcattggttgactggaaacgatgatgtcgtcgaatacatatcgcctatcgaagcagggtatgaatcaggtccagtttctcttgttcggtacctcgtcataagtcccacttgatccctactgaaaacttcgccaacgcttccttgactgctatataaaaagacaaggcggcccatgatcaggatttatgtcttcgtctgggctttgcctttccaaaatcctgagtcggatttccaggatagattaacatccgtatctgcgcatcttaagtccaacagatcagagagagtaaaacgccccccttcttcacaatagccccatagcggagcacctctcctttatcgtcagggggagatcagttggggcacacgtgttacagtatcgtggcacgacatctcctgttcgacatcttagcggatcaatcaccgctcggctatatcattcgagcaacggggaacatcgcctgctagtcatcattcatcactggccaagttatggaggcgataagagatgcaatgtgtgtcctcgcttgggaaaggaatagagtcgtctgatagcgtcatgcaggacgggttcctgtcaagacttcgtgacagaatgggacatccgagagcttcggcctgtaattgaacagacgcggccgtaccgctgcgcccgagtgctaacgtttgccactctgttacgctcgatgaaattccccccactacagccttataaaaccgcataaatcccgtattcttgtcgtagagtatatacaaaagcgaatgatcgaactcattgtcgaagctatgaagtacttgttggcgcgatttcaagcccacattgcctcagtccctccaacgacaagagggattgtgtcggatgttgtagagacgactccgaagggcttttgacccagcgaatcgacatagccgataatatccattccaaggttgatataacctctagctcccttagccttcctgttattgcaaaacaaaacagaggggttggccatgacaatctgccatccgtccaccatggagacagagacaacatctcgagtgtactcttgtcggcttccagaaaagtcggctgggctttcactcagatgttggagagcgtgcgcagtccgatggttgataggaatgtaacttctgactccgccggccttctgcatgatacacggtttgcctgtagcatatcccaaccttaatgggtacttcgactaaatttccagataatagcatcagtgaaggcgttgctggtagataccaatcccccgacagagagaaattcacctgaatgagatcgaccaccgcctgtgcgctcacataacgtagtcagtcaacttgaggttggagtagctcggcgacggaacatcgccgattctgcgacttactttccatgccctttgattcgaatactgttgattatcataccacaatcgtagacaatatgcggagactgatacgagcttcttcacgaagtcgtcattattcgacagcttgtgatctttggtcccgaacctgtacctgagttcgggatcccatggcgtagtaatcaccatagaatacataggcaatggtgcggtagcattcgacccctcggcctgacgagaagaaacagaatctaaacaggcatccgcagacaaaccctcagaaagcacttctgattgacacttcttgaacgcgctcggtggacattcggtctccgacaagggtgtgcgccaactgtatgtagcgctggtttcgagattcatgagcagggattcagaccctggggcgacaaacgtcgaatcaatacttccgaggggagtatagtgaaagtcgagtgagcgccaactaagaccggtggggggacggccatgaccgaaggacaaagtactcgtacgatccatgatctgtcgttgtcgctttatgatgatgccacacgagcgaaatgacctctttggtaagcagatcattggcgtaacgaaaccgcattccaagcgtggcctatatgcttagtgtttcaaccgtacatcgggttgcgatcagctgatgaagaaacttaagaagccttcgcggtctggcgtcccttccatgccgcgtgaagtgacagatgagaggcggttgaggcagcggcgggcacgggccacgcgtggtggtctgatcatgaaaggaggcggtcttcatacgcactctctgttccacgggcaccggtagggtagcattcgctgcaaacgactcctgatcgatcggtcacatgcgtcaaggacaggtgcaagtagtattctgattctcgagtacattagacacagcgttttactagacggaatcacaaccgaaccatactaatacaatcagattgaatgtactagtacttcgtagaggaaatgtgtccgtgtgctcggaaatgaccactctttgtagctgaatcccatcctttacagactcttgatgaagatccgtttggatcggcagctcacctcaaatcagcgcaaggtcatgccgatgatggcgaattcttgtcccagtccggaaacaagggagtggatgctagttccgtactggatggtcatattcgccactggcacatgagcgccattacccaccagtgagaaccaacgctctgcctgagccataatcggatcttgcctccatacccggtccgcccgaaagagactttctgctgatccactaacactctgtgcataatagacgagaggaaattcttcaaagtgatgtcctagagcctggatcgcgtttagtcctttccagaacttcagcccaaatcggcggttctataaagttgcagtgcattcagtctagatatcttcagatgcgttccgacacactcgcttaccctgctagcactgatcctagatatacactgcaagcaagggaatagacgtttagtaaacctccctttgcctgaaaccttgctcgcgctgaactcacgtcttctacgccttcactgccgaatctatcctcaatcgcactcccccacgctgataacggcttctcgccaaggaaacccacttgtgcggatatttgtggtaactccacgtacattgttcggggatagaaccagggattttcgaccgtccagtcatctccaacgagcccaaagccaaattgagggatcaactggccatccggtgcaagcgaagtcagataaccaagatttgccggcgccgagatgaggcctgtgctggggtgtagacttccggcttcataggacatgccgtttatataaggatgctggaagtccccactaccggtccagtcaaccgcagaggtaggtgcgatcccgtagtcggtgccactgtcctggtcttgctgccaagttggctcagagaagtgacacagttgtacggctagagtaagcgccgggaatttgctgtgtcgaattgttctatggatatcgtcgctctcgtggtggaaataatgtatggagggattcgcgaccttcatacagtgccatctcgcattttgatctcgaagtcgcatgaagcaatcgtcggttggacagtccagggatggtcggaatcgaacagagggtcgatcttacccgtgcacacaccccgagaaaccagtttctttcgagtgtcggaactcatgccacagctacgactttcaattgtcgccgaaccttgagttacttgcagagcaataatacccctcgtctataaatgcaatctcgctgtctcagtcagccagagtattttgcttccgcttctccatggctttacccacattggcgacaaatgccatggcctaatttcgaagcgggcgaatatgaagaggttaacagcctgtcgcttcatttgaaaatcacatgagaattgcagatacctactcctctaagctgaccttcgatagccattaccttgcaccaagatgcgaaaatcgattgaaaacccggcttgtacgtgctaatttcgtacgggctcatgattcgaaaggtttgaggcggtgtgatgaaacggttggtgacatctaaagcaatcggatcggtcggtacgtccgcattttgatgcgacaagatgactgatgtctctgtagtgtgagtggtgcgagacgcgtgcgtgtctgagtccgaacggctccaagacaccacaacactagtggtagttgcagctagagacgggactgtgcttgaatcggcattcattttgagaaagccttgtgtaaatagcgcacgaatggaactcaattcgcggacttagatcccaagagattgccacaaagccaaggattggcgaaaacgacgtggtaacggagtgtcttatataggcgtctgccatattagcaccaggagtaccacggcatcaccagcgagagacgcagaccgtgtaatcacaaaggaatatataagaacgcagatgatgccattctgccatttcaacgacgtatctagtgtcttcctttgaccggcaggcaataacgtttctgtgatggcacgcaagccagcaaaagtttgctgaaatctgcgtttaccgtagctcggtgcgcgatgggcgttgtcaaccccttgcgccgcctatactactgaggtagaagtgttctggctatcgtgcaaagttcttaggactggatcttcctgtctgtgatcttaagagagagtgttgttagctctacgtcccattagatgtttagggattttcgaaccgatggcggaagctagcaatcgcagatctgctgtctccttgcctaaaatctcaagctaacgatgatcaccaagtcatacctcttggccctatttcttcgcacagcttatacctcttccaaaattcgaggctaccggtgatcaaagtatgagtgagctccgtgagaacgaacctataagtatcattacttttgcttgctgcaagcatttacatacgagtaggtgactgacaacaccgcatcttctctcatatgcggaatggggggtttctggtaaacacgattatagaggaacgtgacacgacatatggaaggaaaacctgaggccataggcctggatctgtttccggtgattatacgcactgcctaggccataggccatcacgattcctttcctcctctttgcttagtcactacgattcgaaaattctagatacaagcgtttcctgaggacaatcttgcgggtatagggcgactctttttgcgcccggtacgaacggagaccaatcccgttgtagctcagatgctccgcctgacgcatgttcactttgcggagactttcgtcgagttctgcaacactgaccagggcaccgtctcctgaccatgcgtaggcattgagatccgaagattcggttttggaaggagggggcttatttattgagccctttcttgcatctccaagggacatcgaatgacttgggttggctaggacatatcgactcgggtctacctagaaatttgacgctgttgctccattccatcaccctgagcatcatagttccaatctttcggatgcaaatattcagttgtatgtcctcggatccgacaaatatccccttcagtatgagaacgcgcttaatctacctgatagaacctgaaatcacctcttattagcccaaagtatgtgcggcgcattataaatgttacctgtttcagttgcgaaacttgcttatctcgctctggctgtttgaagcacacttccagcatatcgttgagatgagcggcaatgagccgaccaggtgataaatgcaaatcttgtctctctttcagtatgtagcccttcgttgatccagcgtgagagtcatccagctctgtgcacgacccagaccgctcgactgtgctccgttaagcggaactcaaaacggagaacgccaaacccggctcagcaattcagtaatcacgtcgcacgcacgagcgtcacctcttttcgatgaacgacgtcccttaatcgcaataccgacgccatgctctgtcgcttattttggctaaggtgttgcccaagcctcaaacgtgttgctcaagcatcaaacgtttggcggacagcttttggctcatgaagcgcgcgctgtgagacccaacgctagatcagtcatgacggacgaagatcggattggatgctgttcatgaatagcttgctgctcgacatcgtgatatgctatgtgtggtgatacaagattgcctcattccgcgtcgataagcctttgagtttccccttcgacgtttcgctttcctaaaagtctcttgatcccattcttcaaaccgtgccatgttgttgtgggccctgcttgcttgaacctctgcaagattacgtcgataccgactcctattgccaccattgccgtgatcaatccccaaatcccaaaactaccgaagacttcccatccgctcctccattcatgttggtaccgaaccccgctcctgacaacgaaacctccctcgcctctctgacggtatcgtaccgtcccgtcgacttcgaccaagccagaaatagcttccgatccggacccatcgcacacgagtacttgcgcaccgtgctggatggccaagtccttggcgtgatcgatgatgaccgaagcgaccgagccgctctttgcagcaggcggagacgtggacaacaagatcaaagatggggtctttgggatcggctgatggccctctccgcccgatgagattgcgggggaactcgatatggacgattgcaacgagtccaggcagatcaatggcatgatcgggacgtccctcacgtatggtgtcttgtccgcccaatctggtttcgctacacctcgtgggtggtataacgcgaccgaccagagaggaggcgtgtctgatcccggcatatgtccatatgcttcgacgatggggactagtttccgtttctcgtattctccgacgacaccgtgtggcccaacgagaacgatctcgttgcgcctcttaggcctttccaggtcatcctcggccgtggggatcgatttcggaggactccctagcccgactccgacccagacgccatgcctcgccgcaatctcgtggacctgtatcaagacctgcactctttcctcctccgtccttagatgtagcgcttgttctggccacagtagcaccttggcgtgaggtgccaactgatccgtctcctgtaaaaagtccgccaagtgtcgtgtcttcatctgtggcaagacgcagcctaccgagatgggcgtcatctcggatatcggcgccgacatggagagaggagccttgatgggcaagaagatcccggggatgatcgtcatcagcaggacgagaccgacgaacgctcggtaagccttatcgaacaggtccaagaacgccggctgagcggctcttgataatcttctcccgagcatggcggatatcgtgccgtacccgtgtgagcttctcctcgagctaggctgtgtatcggcgagctgatccaccctcgaacctcctatcgaggaaggcgctagactcccctctgctctcgactcatcttcgaacccgatcaggtcgacggacttgtgcccgggaatgccacggccaagggagatgcgtcgacgctcatcctcccgctgtcgttgcgaattgtagatctgggatgtcacgctcgggttatccgagatgacagcgaagatgtgcgcgatgatgatagcccaggaagcggctagaaagtctaggccgggctgacccaaatgccgaagaatagggtgtaggaagactgggagagtcgaaactgatccggtcggggaaccctgtcaattattacatcacaaaggtgagccaactgatctgcaacagaagctgacaccggatgttattgggttgctcacctgccttccaaaaggattaatctgctcaaagaagagccaaatcgtcatccagatgaccggaaatccagcgattccaagccacggacttcgactctgactcggcctgtccgacgtcccaccatcttccgcttgtcggggtatgagtgcttgctgtagcgatcggtacgctacaaggggagcgcatatgaagcccgcggataccagagagaagatcgtttggagcaagaccgactgtacagaaggcaacatgtacagcgtcatcggcaggtaggcgacgaatgacgccacggtgatgattccatatgcgattacgacgtctctcttctcttgtcctggccgagtgatatggagaagtatgggaatagtgatcagactgttgaccagggccgatggggaaggcccaaacgccactgtgcttgtcaggaagagcgtcccgtaggtgatggtggtagagtcgatcaggtccatactggttgatcgagctagaggtcgctagttacatcgcaatggtcaggccagatcgagccgagaccctttaatgtatccttcctgtcaagttgacgatttaaatgtcacagatctctgtcgcacgcctaaatatcgtcttgagaaaaacgaccgacgacggtgacgagtagttgaggaatggctacggtacggttactctggttcacgaaggttccgtcccagggagatggaagctgatgacgtatcgacaaatgataaattcaaagtttaaacatcatcatcggttgacgtactcgtacgtaaaacgtcagcctccgggaacgtataccccgcccgacgtcagctgacccagcttacagccaggaattgaaccttgaacttgaacgtgtacacccatcaacatatgcccgtagaaccaagatgttacaagacgtgctcagcgggtctcacgccactggtccccggtcgatctgacctctgaccgggatctatcctactcgaccctaactttcctctaacccgtgtaactcatggcctcgcgatcgtcgctcagcgctcttctatacctgtttccgcgaccaaagcccgtcagctaccgaccgctccaatctactcgcagataagaggccgacaaccactcactctaggatgaccctgaacatataactctgcatgacctcccacctccaatgttcacgcgcaaagtcccgtccagcttccccgatctgcttgcccaggtcctgtaaatcccggtgaaagcgctgttgcgtcagatcaaaaagtatagcgtccacgccagaatttgactaacggggtgtcccagggaaaggtcaatctgcccgtctgctccaagaggtccaaggaagaatgcagagatatcgtacagatcgtcgtaggaaggcttgatcgggacgtagtgaagccaagggactgtttcgaggttcggtattctaattagctcaatcaactgacagtattatcgcacatggcaaaggcttacccagccagtcctaacaggtgcgatcaaagcgcttcagcattagtgcgtgccacactataggacctaacccagcctcacctggttccagtctgggaagatggtcatcttgaaaacagcactaccggaagtcaacaggcggtagaatcgggaggacctgatgtagaatgtaaggcggtcgtcagcacacatcgacggaaaacccgacttgagggaaagtaagactgaccatccgtttcctgatggatagggggtccgagccgacatattactcagtttatagcgggtgaacactcgcaaaacagaccatacttaccatcgacatcgagagcgtctaccaatcaaagcaataacagagagcagcataagtgaacaataccatgctgtcttggcatggcaagactcacatttatacctcgaacccttctcggggttgactcgaggcaagaactcgatctgctcggcgatctcgccacagagcttgacgttctcacactgaatcaccctcagaggccatggttagttcgcgttcatcgaccaagaaagagacgcgaatcgcttacctggagaggctttcctgccagaccaacatccatataggccttggtcaaggtcgattcgtccagcgtctcaacgacgaaccctcccttgccatcaggcatcatcacctctcttgtgctatcctgcaagacttgctcctgacccttaggtccgttgatcatcaagtgcaacctcatcctgtgactgtcctgccaaggacgttggtgattgaagccgcctgtagaagaccctcgccaaaagaccttgtcgatatctttctcctcccaagggtagaactccgactctatggtcgagaggttttggaaggcttgaagagggacggcgaggatctcggcgttgttggcatacttggagagtacgaacaagggtcgaagttctgatggcgatcgaccaaagtaatccaagctagaaagcaggtatgagcaagaggttgccatttgtagacgacgctgtccgactcactgcatggccccgtggatcctcttcaaccagggattctcgcagaacccaaacgtcttctgatgatcgtggatgaacttttgcccgaaagccaattccgaggcgttttcggcccccgggacgatgttggctggagagtccagattgcaagcgctgaaccaacccttgatcggggtccgcttgagatcttgcaagcgcttcaactcttcctcctcaaaatctgcaaagcgacgtagcgataagcccatggtcttctcgaggggtttccggtacacatcgtgctcacgttctcccttgagagcaagctctacagccctatcccgctggtcctgccctaaaacctgactaccgagatcgtggtcgcttccggtaaagtcgacctcgaatccctccggcaggtacccaaggataccctggatcaagttcctcattgccgtcggacgggaagatgcggactttgcgccccccaatgtgatattgttcggagtaacgtgcagggtgtaaacatagtcgccggttttgagggcgtcgtgacgttttttgaacgtcgcaggatcgagggcaaggaagggaaggatatcggttaccgtacggtcgaactgaagttaagcgcgaacgcaatgtcaattctgcacttcctcgagcagtgttccatttgcatcgtgactactcacgtcgtccacaatcttgatatccttgtccacgcagaatttccaccaggcttcgaatcccttgggcggcgggatcccatatcgccgcttgtactcagccacggcttctttgagtgttcgcgattggttggacaacatgttgtcgaacttttgtcgagcttgttccatcagatcgtctaggtcgatgaagacgggagtgaataggttggtcggatcggcaagcagctgactatcagcttacagattggatgctccgccgatggagtcgcttgaacctcgacgtatccatcgttccgtagatgatggtctggcgtcttcttcttggccaccctgggcaatcccaggttcccaagagctccttcccagagacctcccgcgccggttcccttgccaacctgcttcaatccgcctgcgatcctgatcggtgggcgattcgcgttccccgggatcggggccggctctttcagatgcgaggcatggtccttttcaaacgagtctgaccgttcttgtcctagtccatgccggatcgagaaccagtagagcgctccgaaaaaggcgatcagatagagaactttacgtggccgacggatctgagcgggtacgtgcagtccggccgtcgagtgtgggttgccggtaaacgacttttgacgagcaccagtcagctgccttgatgccatgacgagtcgaccggtgagctgtatcgttgggtcgagttgtcgtccagccaatgccgtttgtgacgataagattaagatgtttccagatttctgttgttccagcgggactccagacagagagcagtgtctaggaaataaatttgcatccgacgactttgtctcacttggctttacggtcgaattaatgccccttaggccatgtcgttgatagttgtgcgaagactcgatgatcgatgacaagaggagtatctttgaagtatttgctcagtaagacgatgctcgctgtgttcgggagtaatgcagggtttgacaggaaaatggccaatgcaagtggtcaacaattatcgccgtgcttcctcgatctctttgacgctttcgatcgaccgcgactttatagaccatcgacggatttctcgtcagcatcgcaagtgtcctatatctttaatctctcgccgtgatgtggctgccaactaataggtgtcgtgcactcttgaaagtatcatcattcgatgacctatacatgatccaactaaagcagatctgaatccgacggtcagaaaagcttccgagcgggaagactcacgattaggtaagccaaaatctcgctctccatttttgcttccgtaaagtcaccgtctcccgaggtgataaagtcaagaagctcgaccgctacatctccttcaatgaaggtccgatttctcgagcagatgaagagagcagggctgataaggctcggagactttgatcataggcatcctatcgtttgggtagccggaatgagcgtgtaggccatctgaccatatcaagcaacgggatcgaaaagtgagcgttcggttgcatcctgaagaattgagcgttcctattcagctcacatccgagcggcagtcttatcctatcccatcatcttgcctcttttagctgcagaacgactctgtcagggacagaatcgacaacaatacagtggaatggggtccccgaacgccatacccatccggcttccgactactttgcctttcccgtcgacatcctccaaggcggagactccctcttcgtcgtcttcgcaaccccgacccagacctcacaaacaacaagcccaaaagcctgcttcctcgatcgcttctggagagcagaacagtcgtcgtgatcccgcagtagcgcaaagaaacaagcagaaaaagcagcacaaaaagaacctgaagaaagtagaggttcataagacgaaacaggctacctccgctccgagcccacagtccgcgaaacctcatccgaagaaacagaagaccaaacagtttcagcatccgaatcagaaaggaaagactttcaatgatggaccgggcgcccaaagagcgaaatcggcatcgcaaggcccctctactcctcagccggagaaagccctaatagactccaggtcgggttccgcatcccccgctcgtactttagagatccccacgccgatccgagaggcagataataagcgcagtgttgccaaaccttctccctctcggggagtccacaggcgtgagatagaaggcaatattgagatacaggacgaagcagggaaggtgatcgatatcggccaacatggtgagcttccgtttggggcatacagctggtatgcatgtcgaacgctaagtcatattttcggtcaggaccggtccctgacaagctcaacacgctaatcagagagattcgggaatcgatctcgctcgcttcccatcagcatgtcaggatggtacacgtcaggcccggaaaccgagtcgtgccgatcttcgatggtcagtcgataccggcgagtctgcggctgagatcatttttgacgatgtttgcacattggcacatattagcgttcgactggacgtatttcctggagaggctctcggtggatcctactgcaaaacaggtcttacaagcacagatatacagtacgggccccatcgaagcacccaccaaaatgaaacgaaagcgagaagagagcgttgacagcgaagaatctccctcactcgagtcgacgaccgagggcgacgcggagtcatatacgaaagagtcagcgaccaggtcaaaaggcagctctatccggcgcaggaaacccaaacgaccttctgcgggagaccaccgttcccgttccagcgacaagtcagagatgtcgatggattcgatacagggctcaaaactgaccttaacataccagggagctactccttcgccagaagcttctcccatgcaaacggactcgggcaagcacgcgcccgaatctccctctcctgcacctcgacttcttgccaatatcggccatcaattcaaaccacatcgtccatcgcctttgagcagaccagtgatcttgcctcctcctagcgtatcatcgggagcttcgtcttctcgagaaagctcgcctgacgtcctgctaggcagcgattccgtgatggaagacatgaccgtagttcccggtgcctccacaggtttgaagcagagcagtagacagcatgctaccgcgactcccacgcctgtccgcggggaatcgtcgcaaggtggaagagggatttcgtctcagcctacaatcccgggttcacctgacgttgacgatgtggcgaaggctgtcgcaggccttgcagcactgctgccagatgtgaccgctacgctttcctcgctcggttcaccctcgtcaacggtcgaagcggattcatcggatgaggatatcggcaacgacacggtcctcgatgagagcggtatcacccaagctgaagctgctcgagcttacgaagtgtggaaaaaccgtaaagcagctgatgacgctgaggctgttcgaaaaaagaaagaggagctcgaacgacagacaaaaaagatcgaggcgaaaaagctcaaggaagaatttcgcataaaaaaggtccaggagaaggaacgaaagaaggaggaaaagctggctgcaaaaaaggcggcagctgcttacaagttgacggaagaaaaggccgcagccgggcgaagagcggtcgaagaagctacaaaacgtttggcggaagccgatgcccttcgacggagacagcttgaaatggtagcaagccaaaaactggaccagcaaaaggcagaagagctcgagaagcgaaaacaagcagacgagaaagagaaaagggcagaagggtccagcaaccgaggcaaggtctcctcgttggagacgcaacggttacagaatgcgtcgctcgcaaaggcgggttcccttgcacgctccacggaacgccctgagcaggcttccagtatgaaaccgtcgactgacacggaatccgatacggagagcgaggacgatgaagaagccggggcaaacgaaatcaagacctcgctgaacgccctcaacggcgctgaagcgcctagtgtgcctaaaataacggcatccgtcgtcgttgcaccggcaagtcaggtcgagcagagctccactgaaccgaatcttagcagcgcgtcgtcctcgtcctcttctaacgacgaatcatcggatgatgatgatgacgtaaacatggaatcatcccccgcccaagtgtcagtcccaccggctgtcccaagtaccgccgctcgtcttgcgcatctaccgtcctcgtcccctgaaccatattcagacgacgaagagcctgaagatgaggctcctcgaaagcagagtcaacggagacgaacacagcggtcgcctagcaccgacgccctgatcccagaaggcgatgacgatgatgacgacgatgcatcgtccatcgatgcaactcaacccctcgtgcagatgagtcaggtcttccacccttccggggaagagatcgaatccgccgatgaacctgaggccgtgatggatgtggacatcgtcgaagatttcccgctgcctaccccggcaaccgcagatgagatcgttagtagcgcagaagtagctcgccgggctgccattgaagatccagatgcgaccgatgacgaagtagatgacgagcaagacgtggacgagcaggatgacgacgcgcaaagtagcggcaaacaagcagtcgatgaagaggagaacgagtcggacgcagacgacgttgcacccgcctcgcctgctgtaacggcacgctctcagcccgagagccccgaagcaatggacgtagtggttaccgacagccttcccacggacaccatggacacagggactgtctcagaacgacccgctcggagaagtttcgctgaattagccgacgaggtcgaggcttcggcgtcggccgtaccgagcactgggaaccaagctctcttccgagccttgcagaccgaggccgatggagaccgagctgccctagagactgtcatatctgaacgacaaagatcggaagagcaaacgcatgaccgcgacgatgttgaccagcttgtaccagacgaggcagccgaggtggaggagagccaatcatcgtcgatacccgacagcacgccaacccctgcccctctcaaacgtcgcgttatgccttcgaggaatagtaaatcagcgggctcgcctagctcggaatcacctcctaccctcaacagcaagcagacgccacccgcaagggccgcgccaaggaggatgaatccagccgtctcagacacaaggaccgaagattctcaggagactgccgccgccagtcaatcgagctcgcaaccgaaatcgattgcaccattaccgaagagacgaggccgtccgtcaaagtctacagctgctgcggaaactgtcgctctggagacgattccggttgaagctcctgttgaagctaccgtagaagctaccgtacctttcgccaagacctctggtctgccatcagagtggaagaccgatcaaacgggacgggcggcacaagcaaacagtcagacagtgccctcttcacagccttcgggaagtcaagaggtgattggaagctcggtctcgccacaggcattattgactcatgaacccgaagaagcgccacccagcccttctgctgcgcctgtacaatcgccagctctaaaatccgatctcacagcccaccgattgccccctcgcgatcctcgggaagaggctaggatccgacgacgagtgggttcgaaaccttgcatcatctgcgaggccgtgccttcgcacctgcagatgaattgccccgtggtgacgaaaggtcttgcatctatcgagggtcggatcgcggagttacaggccgctggaggtcacatgatggctatcgaggcgttgaaaggctggcaaacgcgattggacaagagttcacagaatctcaacaaacttccagtcgcggcgaatggtactcccagcaggatttcagctgcaatccctgcgactgctaacgtcacaccgtccgcatcgcccgcgccgacacctgcccgggtaaatggactgaaaggtttgaatggtgttccgtccccaggtctcaacgggctgtcagcgcggaggcgtgccaccgtggcaacgcgaaacaacattccaactctctcgagcctcaaggccgatgctttgcgtaaaccgcgactctcggcgaccttgggtaaagaacccgctacgacgcctgtcattgaaagaccatcgcctttcaggaagcgaggtgccgacagtgacgacgatgagagctctagcggatcggatagtgattcagacgatgggagcaagggaccgacactaccgcccagcttggcggggaggatggcgaacagtatcaaatctgcaaagaaggctgtcggatggtaagagtacgcatgtgccgcaaggagttgtataatcttcgcccgcacccaattgtacagggcttctatgcatggggttatttatgtgttatctatcaagacggctcgaacaaccttcggcggtgcattgagtccatagacctgagcagacggatttaaggcatttatggtcttgccccgacgaatatgcccctcgaatgtcgcgcgatcgatcgatttgttcgacgaggtggaggtcgagcagactgacccagacatctacctcgtctatcaagtcgtcaaatgccattcatattgacgaaccgtcctttcatcctggacatctagataagaagcacgtgttgaactggtgatcataatcgattcctatcaacgacataattttcccatttccaagcaatctttcagccaggctgcagcctggcaaaatctcaacacagcttgctcttctattatcgagagtcgctggaaccaaaatgtcgcgacctaatcaagggaaaccgttacacacttccgccaccggctcggctactcaaggctcggagattcaaggttcgacaactcaggccgaggaggtttcgaaaagtcacagacatcgacgaagacagaagcccgctcagaggccagctgggccggcttcgtccgagactacagtgcagggccgggtggtctctggaaatattggcagagacttggctcaggcgagacaaagtgttccccagccgcaagctcagcgagcaacactcaaggccaagcaagtagtcaaagctcacatctcgaacctaccggcgagaacagcccggcagtcacccgcacaacagcctgtgcagcgggtccagcagcaacgtcgacccgttcctcctccgcctccgcatcatgctcctagcttcacgctgcctcaagaattcgattcaaagttcgccaatggacagctattggagctgttgaaggtcgctccttcagcctttcccgaccaggatggtccgttcctgacagcatatgcacgaaccctcaccgagcaggatccacgacaacatatctaccctcccttgctagaaaatccttcacgcttcaccaaagaatgcattgattcctggcaagagtcccttccacctgccgatgtccaggagaccatctcccggatcatctggaacgtcaacgaggtcatcgcatcccggtggccgaggatgacattcgtggtcgaaccgttcggaagcgtcagttggcgaggacagacgggaagttcaggagacttggatctcgtcctcagggactactctcgtccgctcggatataccgaggactattggggccaaggtggggcttcgaacatgaagctaccctcggtatacaacatgaatgtggttgcgaggacattgagagacaatggctttgtcgaggtagaaccaatcaagtgggccacaacaccgatcagtgagcaaggctatctcaatccacacttttttcacaggatggggctgaacgagcaattatccacctacaataatagccaaattcaaggatcccttctctggtttcgaggtcgatcttaatgtcaacgacctgggcggactatacaacagcgccatgatcaatgcgtattgccgcctgtctccgtatcagctacgccctttgatccatatcgtcaagtcatgggcgaaagcgagggatctgaataacccttccggtcgtacgggacaacgatcgctgagctcgtattgctgggctcttatggccatcggatacatgcaaattgaacatggtttacccaatctgcaggacgatcggttcatacggagagaacaaagacaggacattgacgtctgggttggctggggacgggcaaagggtattccagcgcatgtttcctttgccgacagtctcgcaccggaggattgctcaagttcttctaagatggctgccgtagaatggcaaggacatgagtttgtgcacagtcagacttccatcggcgacctcgtcaaaggcttcttcaagttcttcgaagagcttaccagcgaggccaccactaccacaagcggcgagactcacaagacacattgtctgtcggtctggaagggcggacttgttgagcgtggattcccgatggatttgcggtacgattccagacgacaagaatacaagcgtcagaaagacttgccggctgcggctcagcaggtcgatggggtcgatgggtctcgcaactattccacatcgaacaacaggagtcgtccggtctcgggtttcgcgcagccacaagaatggtctggagccgatttggttgtccaggatccctttttacatgataaggtcagtccacggtcgggcatctctacgtcgttgcgcttgaccatgcattcctctagaactgtgcaagcgcaatgaaccgcgaaaccttcactagattacaagctgtgagtcacgggaaataaacgtctgttcaaagtttacagctgatcgctttcaccttatcaaaggaattcgctagaggctcgaccttgacgtcgaacagtgcgacactggaaatgttgctcgagacctgtgatcccgttgaacacacaacaagggcacagcggcgggctaccgaacgcgctgcaaagacgggccaggaagaaggaatgcagaattcgccgaacggacctgtgacatcacgtcaacgccgtgcagctgaacgcttggcaaggattgagaaagaaaagagtaatatcgtaaacgccgagaacaccactcacaccttgaccgaaacaacgtcgacaaagacagatagtgttgagctaggaacagaccctcacagcgggcggcagcatgatcaagacacgacgacgcgaaggcatgatgcttcccttgcagcagcgttggccggactagcggtggttggaatcgaatccgaagacgaagatctctcaaaggcagtaccaaaggaagctactgtgactgggcgtgagcatttatttggtgtctaacgttgatgttcgctctcaccaagccatttcacagccaagtctttaggatcagtcgatacggtctactcggccgattcgatcgaatggtcgcctttcgatagcgaagtttttgtgtgtggaacgtatcagatcgagcaattgaaaggagaaaagcctgagaacaaggaagacgagtcagaggcggagggagactcgccagccatcaaacgacatggcagagctctggtatatcgggtagctgacgaaggtcgaagcttgtgagtggagtggaatggaatagccgactagctggctccacaagcagaatttgaccgatgtatctgaaatcagcaaggaaatccagcgctttgaagggcctgcgattctagacatgaaatggtcacatcccggagcgcccggtggaagcaggttggcgatctccaatgcggaaggccagatcaccgtatataactgggaccaggaccaagtgaggaacctagtgactaaacgtggaccgcttgtaactaagcggacgccgcttcgcagtcgattttaacgcctagagaaaccgtgcaagtcgatgaagctagtgttctctgcctatcgctggattggtccaatcagcttgatccgtcagtccgcctgctgctatgtgcgagcctagcgactgataaagacgttctccccctcgcagagcgaattccacgtctatcattagctcgttgtccaacggaaacctcgcgcatatcgttaccgatgacgacggatcgatgacggtagaccacacttggcaggctcacgattatgaaccttggattactgcgtgggatttgtggcaaacggacacggtctggtcaggtacagttacaaatcgctctcggtctgtcatcagcatcgattctgactacactgtcgagcgcggcttgtcgacgtatagggggagatgacctcaagctcaagcgttgggacatacgggacccaatgatgcccacgctcgtcaacaaacggtcagtttcactgcgaccgcgagtgtgaccgtatgtgcctgacaatgctgcatttcggagtccagatttgaagggggcgtcacaactatagcttccagtcctcatgtggaaaatatgctcgcagtgggaaggtgggcattccatgcccaggaagaattgggaaaacaagataatgacgatcacttccccataatagctatgactcgaaccttcgaatattcgacgcgcggaacgctcgaataccgctgcagacaattcccgttggaggtggcgtatggcgaaccaaatggcatccatcagtcgatcgaaagggagacatccttctggcgtgtatgcatggaggctttagggtgatcaaactggatcgacctgaaagctggttgacaaccgagattgaaactccacctcgcggatgggagcagaccgccctcttcgaaaagcacgagtctatcgcatatggggtagattggcagcgaggaaaaattccagcaaatggcaacaattcgctcatcgccagctgctcattttacgaccacctgatgcatctatggcgagcatgattacacctttgcgcacttacaacgccgacctgtatctactacaatgaacaatcaatatttatgctgagaagactcgctcctggatgagcggtcgactatgagtatcagacaatgctgcaaggtcgcggaacaagggcatgttcacttcggatttcaaaacgatgaagactggaaggacggcggccgttagcgctaggagcgtcgctcatgaccgcatgagccgtgcttaccatgagttgggtcatgctccactacggtctcgcacgcccgacaaatatcaaagctgctcgcgcagtgcccgcatctcagccacggaccttgaattgggccaacgtgaatatcgcaaagcgcctgcgattcagaaaagcggctcaaaccgcaggtctgtcccctaatcaataaccttttactcaccgaatgatgcacaacatgttcgagataggctgtagggtccgaagattcgacaaggccacgtacttggcctacaggtctgcggtactgcgtggttgaggaaataagagtcgttcgataaacaagcaggagcagaatgtcctcaccagcacaggcagaaggggcgattcgaaacgaagcgggaaatgcacccgccggtcaagctgtgcaaagacgtgcatgggatcgtgtagcaaatgcgatcgagtctcacactccgcacactggcagagacacgattgtcagcggatgagacaccctgaaccagctcccgctgctcacgagattatagcccgttggatccgaaggacagttcaaacattgaaatctctttccacggatcctgttgtcgcaaccttgacaagccaggccgtggtcaagagtgtctttgcggcgcggtcgctttctgcccggattggcaactcgtggcggcggtacagctcctccgtatatcgtttcgttgtcaggtgaaggcgaacgtttcggatgcgtcgataaatccccacgcagaagcaactttgggtcctgatgtagccacatgtctcgtgcccgttccgagatttgatccagcttgtgagaaggcagaggtagagggatctcacgaaaacgaaaggttagaccatgcccaccacagcttctcatatcagactagactcacctccaacatcagatgacttggcagatgtgggcccccttccgatggctcaatcccagaactctggcaatggcggcataaatccctacgaacacatctatcagacacatattcgatggctttgtaacagtgattggagacataccatgctggacatgtcgtgcagtgataccttgggcctcgaatatctcccaggcaactgtgtgcaagaggggtcaggttcaccgagataataatatttgtcgctctacagtctgctcacttgtggcagaaagcccccgaatgaacggttgctggagcgcaaagcgaaattggccatcagctcgagctctatcgtatcgcttagtgattgggtacctacaggacactgatagatcaccggtatcgaccgataagaccgaatgtgggggtggagctttcggaatccgatcgggcactgccaggaaggcgtgagtgggatgaatctcttgtacattctggtgacctatgaagatagcatcttcgatcagagcaaggcctccccaaaggcttgccacaactcacaggatcgacaaaggttgaatcgtggacaggtcgcacctgaaattggacgatcgcgttcagccatggtcgcaaggacctggacgagggtggacctacacttgaaccgattctggtctgtcttcgcattgcaaatggagcaattcgcgtcatccaaatactctgctcaggttctcgtgtcagctcattctcaaggcacagtggcatcgtgggaagagagcacgcactgatatctcgccatccggtggcactccatatcaattctcggtaggtatggtccattgcgccaaactgcctttgctttccgcccaaaccgttcagcgtgtcagagactcctggtcgaacggccctgattcccatcatccgagtgtgttcgatcccgtgcatctcgatacatcctggacagagctcgaatccgtgaaaagctttgtgtctgttcccatttgacgacaagacgtcgtgcggctcttcgtcattttccgaaagtctcgaggtgaatgggttggatgaccggccgggcgggccgagaggagaaacgacctcctccaacgatctgcccgaaacatcggagagggttgtgttggatccagcgtcgagcggatggcgataaacactcgatgctcgtctggtcgaggtactcgattcgccatcgctctctcccgctgaactggggcgccgtctctgaacgctagggcggccgagtacggtcccaacttcatgttcgtgctcatatccgtcctcctcaccgttttgcagcttgcctggtccgcagatcgtgcagacgtatcgcatatatccaagcatagtcccgcaagctgaacagttcggagcagctgaaggcggaccagagggctcttcgaaaggttcgtcggtcatacctgaccggtcggtgtagcccgtgtcgaatgtcgacgtggatccattgatctgtgccatgaagcccgggtgattcgaggtggacgctcgatgctgactgtcggtcggagatgccatatcagacgacacgtaggtgtaatagcattctggtaaacccgtttaatgagcaccgaatcggactatctctatacgtttttgcgtcgagactcactgcctgtaccatcgactctcaaaaccaatcttccctttccttgctcataatccgtccccgattcagccctttcttccttgcccacccggctagaactcctcgacgaccccgttgtggagccaatcttcctggccaccctcgctttctgctcttcgatccacctagctcccaattcggaagatgtgatcgaggaaccgccaatggatggaggtcctcttgatcccggtcgaccgagactgaagagcggatcccatgaagccggtcgaatcagagtctgtatttgcggctgcgcttgcttctgggtgtctgtgtagatctgggtacggatgcttagatccttgggccgtccgttcgtagctggggtcagacccaagctcagctctgacgaatttccttggctgtatgaatccatgcctgacccgtcaaacccatgcccggcctgtgacccgttcgatcccggcccgaaaccagactcgctctcctcggcgatgacttcgtctctcaccctcctcgacctataaccactccaccctgacccatcgagccccgaatgactggactgcaaggccgagctggaagatgtgtatgccgagctctcatactcgtcctccaagcccaggtcaagcgggtccaggtcgggcaggctacccgctagggaagaagtatccgacaagctcgggccgtcatactcgagaatgatcctgaactgtagggtaacgtatttcttttcccgggcagttgaagctggattgctaggcccgttgcttgcgttcggcgacgaggttacgagactcccgttggtcaagcgagagtgagatgaatcggctattccgtgcgagaggttgaggaggtcgtcctcgccggtgccagacataaagtaccagatggcgtccgtcagctcgtcttccgtctgaatgagacagtcctcgccttcttcgtcatcatggtaagcgatgtgaaacgacgaggtgctcagcgagaatgtctgactgatctactccggcatttcaaggtatcgatcccgttgctcatcagcttctgacccagcttgactgctcaaccgatgattgatgtactgactctgtctttcagtgcgcctacagtgatggtctttgccgatcgaaatgggatcttcttgggcaatttaccgtccaaggtcgaacatgctgcgaaaacgggatgatccggtctgtccgagccgaggctgctcgtggacgacatgtcggtgcaccagagcaagacggagattgatacattcgtctgtccagacagaggcgagtcgattgatgcttgcttgctacatgcaagtctcgttctggtgaccagagtatcataaatccatcttgggggtgacgtcgagtcgactgcgacttatgaatcgacctcggccacacttctggagaccgagatttacatccggtggcatattcggaatcaatttcggatgtaaaatttgattccggtctatcgtggccgattgggtcgagctctcccccttcggtgacgacatggaacgagtagagcgaaggtcgccatcatatcgcctcgtactacatatcgacgacaaccaaaacacctccatctctacaccggccacacacacacacatctattcagacaaactcacaatgaagctctctcttttgcctctgctcgctctccccttgacggccatcgccgctcccagccctaacatggccgggatcgtcggatgggccgctgataagcttgtcgacggcgagatgaggaccatggacagctggcactatgtcgattgcggtcagtccggccttctggcataaaaagcttaccttgactgaatccggccacgttttgaggcttaacaggttcggcttcggacgtcatgtaagcgttccaatctctaccttcatttcgctcttcgcccccctttgacgctatcgtcgtctccgcttccgcctctcatcctcaatcttaatgaaccgctactgatctgcaaacgattgctctgctctttcacagccagctcaaatcactgactgtcaagcctgaccctcctcgacccggcgaaaccctcgagatcaccgctagtgccgatgtcctcgagacgatcgacgtgagtaaccctcgtgacatcacttgttatcacatgcgccctgttgtctaattggtctctctcctgctttcttctttgctcgtatgctaactccggatcgctgccacttcgaactcgtcatacttgtcatctcactcgttaggaaggagcctacgccaacgtcctcgtcaagctaggcttggtcaagctccttcagaaacgtttcgacgtctgcgaggaagcgtgagtccagggcctccttctggccgtatctcctccgacttcgaatgagatgctgatctggacgccggtactttaaagtgccaacgccaacgcctcggtgcaatgccccgtcgctcccggaccttacgaggtcgtccagaccgtcgatttgccaaaggaaattcctcacggtgagtcgccccgacgtcccatctcgtctcgtctcgctgctgaccttgtcctcctgtatggcgatgcacgacatcagccaaattccaggtccagctcagaggattcaattatgacgagaaggacatgatctgcgccgatatctttatcgactttatgaggaggcccggatcggcttgagacgttggacatcctccatgtagatctcggaccggagcccgtcaggacgacgagtgatgacgcaggtctctggaaagctgtttcgtaaagcctgaaggccccggttcctacgctcgtgattatatccccatacaataatgccacttgtcaccgttactgttagctacaatatattgtccaattccttattcgaactgtctatgcccgttgcctgtcggacaatacgtatgaaagcgatatttcccatacacctttgtgaccgtttcgcgcgttccccacctttccctcaccttgaagcgattcgggaaacttctcacgcgcgtcaaatcttgcaaagtcgaaccaaagttgggataccgacctcggctcgaagttgagcagtaatcgtttttgtcaaatgatatgttctctttgctaacttcagcctggattagccaaaacacattctagaatactacttacaaaagaaccgtagacgagttcacacgatcgacctgtcgaccgccaagagagaaccagaaaataaacgtaaagaacctcgtagcaagatgcctagctcgaccagcgccgtcgcacccaagaccacggaatcttggcacgcccctagcttccgaccagaggacatcaacgccttgatctcgggagtcggtgagtctgagagctcagtctctagtggttttgaaatcgacattgagccgccgactgacacgttctacctgttctctgcagaccgatacaaccctcacaacgtttctctgttggaggactacctcgacgtccagatcaaggacggtcaacacgactgtttcgccaatctcgccatcctcaagctctaccaattcaaccccaacatggccaatgccaaggtcgtcatcgacatcctcctcctcgcgctcgtctcgtcgcccacgatcgattcgcccgacttttctctcgcccagtccctcgcgctcgatcgaccgagtcaggctatgctgaagcagcaaaactacgacgacgaggacgacgctgcaggtcatgtggatgagatcgagacggtcatgccgttcttgcaaaaggcgtgggctttgttgaaagagtgcaagttccgagagttctggaccgtctggaagtcggacaagagcgatggcgccgagggtgagctagatgtcgatgaaaaggctcgaagagccctccatgggattgtcagttgatcgatacgaccttgctctcagtcatccgaagtcaatacctgcccaaccacaaccaggccgttccctccctccgtctcctgatcgccacgaccattgccagctcgttctcctcgatccagaccgctcgtctgcaaaagtggctcgactttgcgtcggcctccgaggtggctcagtttgtagaaaacttgaacggatggaccgttcagggagattctgtcaagattgagggcaacggggacaacgacgtcaaggccggtgtcgtcaaggagcaggtcgagctgagtcgtaagtggagtgatcggtgcacgaaaacaatacgcaccgcttggactgatcgctttccatcgcgtcccgtttgcagagcttaccaggttgatctctgtcgccgctcagtaagaagcgggtcagagggtagatttcgagacgaagggttccgagggggcattaccatctatgcatcgtcaacgtgtattacttggaccatatacatccaatagatcagaactgcacggaacgtggctctcgatggccctctcgacctaatcacggatcgagagtgtgatgaccatgcgtcatcgcagcaagagtccgcgctgctattcctagagattatagaacggccgagcgagacatggagcttcgacatagctcttgtcaggggagactgtgcagcggcgatggtcctgtcaagagccagttctggccgacaggacggtaagatagatgtcgctgaacgtctatctcttgagctacagtctatacaacgtctctctaactcaatcacacgagcttggcgagcatggggtagatggcctcgtaaacggtgaaaaccaaacctccactcatctgaccgccatcatcaccgaccacgacacgagatcgacattaagcgcacgtcagacctcgaggggcttgtaaaatgactcaccgaaagcctggccaatctgggcgtagtccccttccagaaccgcttgactccctcctcggtgaaaattctataagcgcagtgagcagaatttcggtactgcgtccgggcttctagtgattgcatcctcgttttgatcacgctgtggtaagttgcaggagcaaatcagtgatgatgttcaagccgggctgtagtatcactctgattctcgcatgcgtgacgtactcgagaggcatcgtcgtgtctgagcgggccgagcaagtcgaatagagaacctgtataagcccacagagaactttatcctctgtccacgacacgactcacagacggtgatgattcccgctacagctccgatcccgaaagtcacgacgctgggaagctgttgcccaggcctagcggaaccttgtaccgactgcttcaaggtcgagtatgctgaaaacctgacagccgagttggctccttgtctcatcgcctgtccatccgaacccaaggcgtgagcttcgagaaaaggtcgcgagagaacgattgtcacgccgagtgcgacgtacaacgggcaagagtccccggtagatccctccgatcccctcgtcccggatgatctgcgccgaaccgtgcaagagtcccttgtatcggggttgagcgcgtctggaatcttcgatcaacttggtcctgatgatccgatacagatgaaaatgaaatcaatgtctggacgctcgatcgaaggaacaggcgttgactgacttgatcgtttctgatggggtaacggcaaatacggcttctgtgagacctgctcccagaccagctagatgcgagaagaataggccgcatcattacagcatcccaggcgattattatctcgagctgtcgctgtagatctcacccaaaagactcctcggcgcgctgagcttgccctacgacaccaatccgaccggcgatcagcctcaaagcgacgttggcgtagtgatccacgggtaaggactgacgttctcatctttcaataacgtcttgtactggtcgtaactcaagaacctgactcctgccttgacggcgtttcctaccacgagcgcgctgcatcctgcatagatcccggtgattcccttggaagcgatcgtctccctcaagatcgagatgggtccctataggtacagagtcgtgctctgtcaacgtagagtacgaaccggtgtgaccttatacattaaagcttcgaggacccaccttgctgatcccttttcctgcggcgaactggagctgcgtctttgcatactctgtggggtaggtgacgaacccctcgatggcgcccgcagtggtaccggcgagaagcgaggccaagggcttttccccggtgctcgcctttggcgcagcgggcgtcggaacaggcggttgaggagccgctgcgatggaggtagtagacgacatgttgcgagcttggcgtgttctcggattcctcaggcgaacattctgcccgatttactcctgcgatgacctgctcgctgctcgtccgacatttcagtacatgaggttagcttcgggtcgttacttggaaggtgccagaggtggaaatagatgttacttccgtgacgttattgcttccgatcgatgctacgatgacggcatctaggtggaaacaagcattcctgcccctaccactagggatcgattcatcatcaccatcaatcgttactggccatgtaccatatgttgtcacgtccttgtcggaaacactgagtacgcctcatcgaaagcgattgctttgacacccatttcatcagctaggctgaaatactcgccctccttgcctaaagttttgttctgtcaagagacatatttacggcgatccatagagcacacgaaacaagcgaagcgtaaccatgtctgacgatgaagactgggcaatgggaggagtaagttcctcgtctgctgcccgtctctaccaataattcttctccagcatacaggatcttatacttctccgttctcctttggacaatagggggacgacgaggactatgatttcgattacgagtccggagacgaagacgacgaggagaaccagacgacagaggccgacccagagaacaactactacctggccaaaggtccgttcgaagcgtctccatcccgaaattcataccgattgcggttgctgatattacatcttattcgcgactaggtgtgaaagaagacgacccggaggaagcgctcaagaagtttagagagatcgtcacggcggatgccgctgaacctagtaaatggtcagtctctttgccatcctctctttccgcctcttcctcttcgaatcgaatgtacccaaacaggtcacatgctaatacgcatgtcgataaaaaaaaaaacaggggtttcaaggcgctgaaacagtcgaccaagatcctcttccttgaactccatcggccggaagaagcgctcaagacgtacgaagagttgttgccttacacaaaggtcagtcacatgcgccctgactcccagtctcgtgaactccagagaatctctcgcgctgatcgcatggacataatcggattcgcagagcaccgtgacgaagaacgtctctgagaaatcgatcaacaatatcctggaatacgtcgctggagaaggcaaggtgaggcgagctgcattgacgtcgaggcccatcgtcggagggcttctggatgttccagtgtcatgctaacaaacggttcgcggctatgtagcatgggaagaaagcgcctcaagtcagtctggagacgctggaggcgttctaccattccaccttggccgccctgaaggaagccaacaacgaggtccgtaccgccccgaatgagacgaaaccgaccctaaacttatccatatgatggtattgggcgcgtagaggttatccgtcaaggctaatctaaaattagcgaaggtgtacctggaaaagcaagaatggacaaagctcaaatccgtcagtatcatctctgttcactctcggtgatttgccgatgatttatctcaatcgtgttatcttttccatcacctggccactgcagctactcaaagacttgcacgaagcatgtgacgcggatgcgtctggatcaggaacatcggctgaagatcagacccgggcgtctatgcgtcagtcctggatgtgtttatgtttgacggataagatggtcactaacgtgtgacgtggatcctgcatgctcagttttggaactctatgcgacagagattcaaatgtacagcgagctaaaggacagcaagaagatgaaggttcgatttttctcgagatgcaggatgttctcgttcctcggttgattgaccagatgtgccgaaacaggcggtctacgaggccacgtcgaaagtcaagttggccatcgcgcctcccagaatcatgggtgtcatcagggaatgcggcggcaagatgtggatgggcgaacgtgagcatgtgttcagatctcgccgcgcgatcttacaaaaagctcagataatccgaatcccaccatcgcaggaaattggccaaaggcgtactcggacttttacgaatcgttcaagcaatacgacgagtctggatcgacacagaggattcaggtcttgaaatatctcgtcttggcgaccatgttgatgggaagcgatatcaatccgtttgaggctcaggaaaccaagccgtgaggcgtttacgattcggttatcggttggggcgacgatgagactgacctactctccgtgcgtggcagataccgaaaccatcccgagatcgaagcaatgacaaatctggtggcggcctacgaaaggcgagatgtactagaggcagaacagatcttgaaaagtaagccggtatcgagtagacagtgaatctgcggcgtttaatccatgtggctgttcgatcaccagaaaaccgcggaaccatccttcaggacaccttcattcgagcttacatcgatgacgtgctccgttcactgagaactcagtacctagtcgatctgatcaagccttatacgcgaatggagctcagctttttggcaaaggttagcctcgcccgcccacctcatctgatcggtcttgccactgacgtttcatcctgctcagcaactcaacattgaaacgcaagatgtcgaggagattctgatcgagttgattctcgatgggaaggtcaaagggaaaattgatcagcagaacggaagggtcgagctcgaaagattgtcagtggaatctatacgttgcccgctccgggccctctggttgacttcgacctcggtcacttttcatccagccaaaacgttacgaacaatcgatacaaaaccctgaacgtctggtcggatcatctcgccagtatctcgcgaagcgtaacgaacaagtcgggatcccgtttcggaggaggcgacgcggaactccaagccctcgatctaaatctgatgggctagatctccgtccctccattgtgtgctcctgcctacaatatttacgcttcttgacgactggttccctggttcaccatggttctcttactgttgatatgtacctaagccagcttgtatctcattaaacagttcaaaggcccgcatagactcagatgaggctacatatcgccactcatcgccgtcgatcgtcacaatttaaacgcaatctgatacgcaggctagaacaaagcagaattacagtcatattccgttcgtcgtgatggtaagacgccagtatgtgggtatacaaaaatccgggaatgcagttatactgccgaaagtctgttctagatatacaaaactgatacggtctaattctctgcttcactcccacgctcggccatcgggatccaaattgtcgcgcttgggcttgtcgtaggtcaataatctcaccgccccataggagtggtcaaagccacctacggcgagaaccaactcggtctaaatgaatcgcgccgcacaaggaaagtcagttgcgatatagtgtttctcgatgcgaatgacgactcacaggatggaaggcgagggcattcatcccggctccccaacgcctctttggttggctgtgagctaaggcagttgtcgctttgccttgccgcttgtcagtgtcataatcgcccggcagaccagatatgctgggtgttgatggtgccgaaacatgacctccatcgcctcgtatcatcaccgaagacagcaagtttggctgtggtccgtcggtatccgcgtcagggcggttagagtagctttgagactgcttgtcaccggaattgtttgggagaccgctgtacttgtctgttcgaacaccacctcgactggaggactgagaagacctcccgcccgagtcgaagccgtaagagttgctttcgtagccgcgagtcgtgtcatcgtccatgcggtacacgttcaggcgttgaccccgcctgacgccgttttgtccacttccgtgactatttcgaccatcattgtaggaggatgaggcataaggtgctgacgtagcagcaaagactgggcagtgggagtgaatggccatcgacgagaggccgttggcaaacgcgtttgtcgaggagatcgggatgtctgactgcctgatatcccagattttgatatctccgttcatactgcaatcggaacacggtcgataagctttatcggacagaccatttcgacgactcgacactcacctagcggaaattagatcacggccatccccttgcagcacgcccactgtcttgatccaagtatgatgctgacgtaaaaccttgactacgcccttctcttcgcccattcgcttgtcgaacaacctcacgacaccatcgccgaagcctgccgcaaacatatctcctcctagctgatcggaggcgatagccgtgaccggactacctgcttgcgtggggaagtccagcagcagagactctatccctgcgtcccagatccggacgaatttgctgtctccagcaacaagtaaatgacctgtccgctgttcccaggacgtaacaactccgctcctgcgagaaactggatgcttctccgcaaggccgtggaaagccgaggtcaacctgaccgtgtcggctgagtcatagtcccggtagatgcgcacgcttccgtcagtcgatgcagtcaagaggagagaggccgctgtctcgttgacataatgcatgctggagacgctgctgccacgggcgttccccagggaaaatttggacaggcgttgtttagctttccagtcccagatgcaaatgttgtctgcgtcgtcagaaactgcgagttgcggttcgaaagaatggaattcgaccatgcagggccaagcttcattggccagtttgccatagtcccttgtccatttggactccgatgccacttcgtcggcagcacggctatactcgatgattcggtgattccgttgctgcctccagttttgttcattgaattccttgcttcccggttcctcagcaatacgaatccgcatctggggttccttgaagtattgcatactgtaatcgtaaaagtcgctgcgcaagggcaagacgtcgtccttgacgtgacttgccaccatgcctagacccagctcgcccggctgggccatacctccatccgcataacgactgtcggctgggttgcttcccgcttcactccgagccatacgcctgatgttgagtctctccatgtcttcttcggttagggcttgtatcacttgcgctgccgagaactttttagacctcggtttgtcgtggtccacattggtaaagccgaagtcggcccgcgaatgagcctgtgtcattgatgctacggaagcggaacgcgagaacttgtcggatgtcctggaggatgcaatactcgcctcggtgtcattgcgagccatagggtatggtgggacgtatggttggatatgcaagttcgattgcgtaggggttcggctgggtttgggagacgcttcctgtggtggtggagtttcgggctcggcctgatgatgctggctatagccggtcatcgatgccagacttttcagggcgttggcgatcgagctgcttcgcttcaaatttgcagacatccgagaagttggattcgagctcgcctctggcctggccgaaggctgtggctctaccggagtcgacaagccagtgtgagagaaggatggactcgagagactgggttgagccacgtctgcgtttgtgccgagacgtctcgtgcgctcttcgtaacctttgatcctcaaagatgatccggtggcccgcgtgaaagctgagtccatcagcagtgctgttagataatccgtcacagtgcaagcgagagatgccacttctggatgggggtccacggatagatccagcagggtggacaacatcagtttgaagatgaacaggattgtcatgttctcttcgtgctcttccttggctttctctgggtcctcatattggtctttgatacgattaccccattcgtgaacggcctgagctacgaggtcttccccgtcatcgccggcaccgtcgtcacccatgtcccgccgggctttgcgctcttcaagctcatggtatgtccaagccgccgcgacaaaccagcctcgccattctcgcgcgatgcaactgaggacgacgaccaattccttgcgcacaatagggctcgcgtcttctttggcttgtagcacgcaagcttgggctaccccagcttcgagtcgtagctgatgtcgctccgtcatcccaatttgtgctccggtaccacctccgcccttggccatgctttcattaggacctgttcctgcaggcatcccggtcgccccgaggaaagttccgatcgcatacattgcagcggctcttacctcggtggcgttgtccttgagcatgaagatcaattgatcctggtatccttcacgtatggccaccatcttggcctcgtcgttgccgtccgcccacatctgagcaatgcacagtgcgctccattgcttgagcagccagtcatgctcttgtaatctgatgaagcagctcctgaagacgtcgagagtcatgcaggccatctgaccctgcttgaaccccctgcacaccatactgaggatgaaagcacacatggcacgatgttcgctggcgttgggaatgagcagcggtgctgtctgtggcgatggcggggcgagaaccttggcaaagtatccaaatccgttgtctttgaggaggtcgacttggcaagaacgatcatgagccaaaatccgaccccagataaagatgaggaccggtttcaagtcgattgcaggggattgcaacagcttctgcacgtaagggaaaatcccgatagacagagctagacgcacggcccagggacccaagtcgacaaacttggagagcaggatcagagctcgaagtcgatgagcctgggataataggacctgaagcacaatcggtagttgatctggcggtttacgggcgagatgaggcgtcttgggccgcaatgaaaggtggttcgataccgatccgtcatgctgcaaccagacttcgaacgcggtcagatgctccgtaaagaagcgggagggctggtattcgtatgtcgggggcgcgttcgggttgtccttgctcttcgcttcggcttccagcaaggccggcaactggttcaggcaagcgtccacggcgagatcccacgagtgccaaagaggatggttgtgtgtcgccggtaaggccggatacgacatgggtgtacagttgtacgcccgcatgattctctctgccaagaggtaattccggaacaaggcggcgaccaacaagtcttgcctgaacaaccgcttgaaaatgtcgtggggaaataccagccacgcgatcgtatccgtgacggcagtaaagatccagttgagttctcccaatggagttcgacgatccttgaggtcgcccggaatcttcatgaccagatcgaccgtgatcttcgccttgggatcgcttgggtcgacattcatgcggagaggatcctgcaggacgaagaatcgcagcgcaatctcgatgggcgaggtcaagcagcacgagaaaagatccgctgggagttcgggggacatgggcaaggtctgatccgcttgacaagcggccagatggatacagtcgaggaagggcgtataggttccttcgactggggagttgggttcttctgggttgggcggagtaggctggcgggtctgtcctcccgaagcggccgcatcggcgtctcgcctctctgcccatctattgaagttgcttatgatattaccggcagccgagcagtcccagacaaagatgcaagggctagaccagggcgcagagaacttcgatcagatctgcgaaccgcctcgctgtctccgctttcggacccaccttccgagccaactctgtaggtcaaacaagctgaccgggatgtactgtgtcaaatctattcccgcagccttcgcgtcagccagtgtggcttcagcgccatgctgaaccgctcgactgactcttgttgaacacccagatctctccgctcgccgtcggtttcggtactccatgtccgttgtaatacatcaagatccgctcgtccttggcctgtcttcgaaggttgacgcagaattttttcgtctcttccacggaagggtcaaggtactgcaggtccgaaggtgaaacgcattagggtgagcaatcggaactagggaaagagaccagatctgtcgcaggctcacctgcttgtacctgacttttggactcagggtttcaaattgctgttgaatatctgtcgatgcaagccgatcagtccagcttcactcgactttgagccaaagcgctagaaagcgtcagacgtactccttccgatcccttccaacgccttgttcggaggcaagctctccggatcgacccagcattctaatttagcgcagggggtcgtcttgacgacatctggaggatcgattccgaggttgagacagagcacgagtgcggcggagaacgtcttgagtctcgaccgaagacgccatgggggtgctatatcatccagtccgtggtggatgagcccgactgtcttcggaaagacgcgagtcgtctgctaaagactgacctgattgttcttcttcggacaacgaagccgggttcccgctcgtcaagtgccgagtgtttacccagaaatgctgtccttcctcgttttccaaaactcctagatcgtcctgcccgtccaacagaccggaatgcgatcctcgaagcccgtacgctccgccttcggaactatcatcatcgtccgtaaccgaaccgtttcctctggcattattgtggttatgaccatgactgggaccctgggtgatcatcccgaaagcggatttctgagatggagctcgagaatgcgttcgggtccaggtgccgcgtgcggaggtggtcccggagagagcttgggcggtggaggattcatctcgagagtaatggagggtcgagctaggagcgaccgcgttgttgttggccatgcctttgaggagatggcagcatgtgctgacgatctagctgaatatgggaggttgagagaggtaggtatggccagttcaagaagaaggggtagtattgcaagaccgtgccgctcggacggaggtgaccgggcgaatgtcctgtgacgagttcaggcctcagcgcatcaccgcgcgatatgcgggtcaactgcaatgtcaagaatttgggtagctagcttggctttagctatagctgcagtgagagactagatgaagcatgcgatgatgtctcgaaggatattaggacgagtatgctagatgacgacagctggctctgagccgggtcaatcgattcgaaccacgcaaacttggtcaacgaagagtctcagttcaaagggagagagtcggctcagtggtggttcccatacatggtgatctgtttggaagagcaaacaccatgatgtacatctgcctgcattcgccatcaatcgcttactataaccacccttcacatctagattcgtcatggcttctccatctgggaatccacctccttctggacctcagccgccgctcgcgaggcccgccaacggtgcaccccaaccgccttcttcgcagatgcaaccccaatcccaatcccaacaccaacctcagcctcaacctccgacacagcagctacagcagcagcaacaacaacaacagcaaccacttaccaacgctatgaatccgacaaccaccaacggttctccgcttggtccgacaccattcgccctcaaccccccacctcaactagcttccaacatgagctcgaatccgaacctcagtgggaatcctaatgctgaggcaggacctggaccccggacggccggacaaggccctgctactgcaggtccgtccggtcaatctaccatcactcctgcgcaaaagagagaagaagaacggagaaaggagatcgaggagaggaaacgcaaggagcgggaagaggtgctcgtgaaaaaggacaagtcgctgggagaaatgttggtcatgctggaggactatcaaccattagtaggtccgccgcggaaattcgcagttacaaacggtcgttatgcggagggcagagctaatcttgatgagcgccccggtgtagatcccggatgaggtaacggattactacctgcaacgatctggatttgaatgcgatgatccccgcatgtgagactcgagcctaccaccttatggaatcggcatagaatacacattgactcttcccatcgtatttgccctacgactcgaactatttagcaaacgcctactctccctggctgctcaaaagttcgtcaacgatatcgcctcggatgcctttcattacgccaaactacgcatgaacgctccgagcgccaagacggggaaagcgggatccaaggtaagtcttcgacgaactccgagcggtcgaacggtgacctctttacaccggacatgcgtgctgacgaccacgattggcttttactggaatacagggcaacgaaaaggataagggcaaggtcgtcctcacgatggacgacctgagcaacgctcttggggaacacggcgtcaacgctcgcaagccggactactgtgagttggcatcgggtcctgtggccgttcggaacagagggaagctgatacggatcgatgtcgctcgcgaagacttttgagcgcgtacaccaggagtctttcccccatcatcatcatcatcatcatcgcaacttacgaccatccaccaaaagaatccttccccagccattgctgtaatgacctacgcttgtacccaaccatcgcactcggtggtgacatgtcgaaactgcatccatgaggccacccgtccctgccgaaccgaaatgcgaggttgacggtgagacggcgctgcttaccaggtcgcagcggagaactccggttgttttgcggcaatttcttcggcattcgttcccaacgaaagcagctcggggcccagaggcagtgattgatggacactgagctgaattccgggtcggggtaaccttccagatctacgatagaatggtgtgatcagaagaggaagaagtcattgcccaggcctgggcgtccactttaactaattgctcgcccacgagggattgtgcccgggatgagcccgggcacgcgagaaggaatgatcgtccttttgttcgctgattccggacttgaccgcttgttcgtgacaaccccgggttcgacctcgtctttgtaattgtaccagagctacagccgagcactcgtccgatccgatgccattcacacccacacacatctctacgctcttgttcgtttgagccgtcggcacagcaatctttgtcgcatggctttcggctcgtttccgtgcagctcgagcagacgatacagcaagtaaacgggacggcttgcaaacgattaacgaacccccttgatctaggaaaccccggtggatcctgtcgatacaccacactgaacactgaacggccacgtcgttccctcgattttgtttcgtgctcgcaccggtggatctatcgatcacttcgattcgcgttttccgggagaaagcgttctcgaacgattctacacaacatccgccatcagctcatcgcggtcatcacatcacaactctcgtcgggtcgggatctacataattgaacgctagggaacatctgctggatcagagaacagaggacagcaacgcaacttgcgtgagtctttcgtggtcattctgggagagatgtttctccgacttcaaacgttttgatctgacgtcgtagatttgcgtgctggaatattgctccgtattgtgcttgcgtttcgcaagttcgcagtcgatcgaaagagaacaaagagacagttcaacatcggggacgcacttcggggtccaaaggaagaaccaacgacctaagcgatcagacttcggaagtgatcccatcactggtaaaggctaccggcatcgacaatcatcagatcaatcctctcgttctcatcgaagacgcaccacggccaggaggaggaagactcaaactagatctacgccagagtagacgggtctcaaagggtgaagcttttcgtaaatagaagcttcctttgacgcccattcgccggagtagccacacttgcacgtccatcgggagttcctctcgtccatccttcggtccctgccgctcctttcgagtgtttgcggaacgtaagaagaggtgaaaagcggagaagaaagagacagagtcgagactcttcccgcttctcgagctcgacatcatcaatccgaggtcgtcgactcttttatcgctgaaacgacaacgatcgcgaagcgattcgatcgcttgatctcctctcatcccgatccgatcaatccgagggctgtcaacaaaacacactatcaaaactcgacctgtcactcttggattactacgtccgaagacgaacagacgggatcaaaggtgacccacctccccaaaagcatcacatatccgctccacctcccatcaactgcctgataccagatcttgcaagtcacttacaccatcccgcaaccttcttaccacctcccgatacaacattattcctgacggactcaaaggaacgtgtagagccaaaaacaagagtgacatcgcgtggagacaatacaattactctcgcctatatagctttgctcgctcggatcagctcgatcaaggggatcatcaccgttcaccgttgtgaatacgatcccacaggagatcataggactgcgaaattttcttgctaggcagacattcagaagttgaaagggaatcataatcaataatacgagactagtcagtcgattaccaagctgattagagagagctgacgctgacgaaacgccttcctttcgaccctcgttcttggctgtcatcaatttctctcgacgtcttcaatcttcctgatattcctctccaatcatgatcatcgtataccggatgggatcctccttcttgctacggctctcgctcgaccattacagcacaatatgtcttctcaagcggaaatccaggaaaagatcgccgctgctaggcgagaggccgatatgctgaaggacaagatcaggcagcgtaaagaccaaacttcggatacaagtcgtgagtttattctacgggcccaaggtacagacgagatgatccaccccgggaactgactctatcctgaccttgacatctacagtccgagcgatggctcaagaagtcgaacccttgccccgcgtggtcatgcgcgtccggcgtaccctcaagggtcacctcgccaagatttacgccatgcattggtcggccgataacaggcacattgtctctgcgtcgcaagacggcaaactgatcgtttgggatgcttacaccaccaacaaggttcatgccattcccctccgttcgtcctgggtcatgacctgtgcctactccccctctggccaattcgtcgcttgcggtggactggacaatatctgctccatctactctctcaagggaggtgggaacagtatgggcgctggtcaacctctcggccagatcaccaaggtgtcgagagaattgagcgcgcatacgggttacctgagttgttgtcgattcatcaacgatcgccagatcgtcacgagttctggagacatgacctgcatgttgtgggacatcgaaaccggatcaagggtacaagagttcaacgatcacacgggcgacgtgatgaggtgagcacattcgtgattgatcgaacgatggcgatccgctgaggcagagacgccggcgcaagcagtctctcgctgtctccaaaccagaacattttcgtgtcaggagcttgtgacgccaccgccaagttgtgggacatcaggtctggcaaatgcgttcaaacctttatgggtcatgaaagcgacatcaacgccgtgcagtaagcgggcaatgagatcgtatcttcgcttcatcgcgagactgaccggctcgccgtctgatctgcacaggttcttcccagacggccaagccattggtaccggttccgacgatgcgtcgtgtcgtctgttcgatctcagagccgatcgcgaactgaacgtctactcgcacaacaatattctctgcggtgtgacctcggttgggttctcggtttcgggaaggttgctctttgccgggtacgacgattacaattgcaatgtgtgggatatccttaagggagaacgggtgggtgtcttggcgggtcatgagaaccgggtcagttgtctcggcgtcagcgccgatgggatggccatgtgcacgggtagctgggatggcctattgaaggtgagtaggttcgggaacagtagaagcgaccttgtaaatgtactgatgtgacggtcgcaatatgacaggtctggtcataacggtcgtcgagccgttccgttttaccggttcaaatgcgaggccacttttgccttttttcacgttactccactttcgaaggaagggatgacagcaatggccgcttcggacggccgctaggtttcccactcatactttccaacttattcttttgtgcattgcttttgtaatggccatgctggtccaatcatatctctcatacaagacgagtctcggtacatcgttgtggcgaccagtaatcgaagctgatcacaaggtgataggcgagcggcggatcgccttgtgaggcaggtcgtcatgtcggtctcaaaaaggttcaagcgtaacgaccggttcggcaagacatagaagagcgactgcgaggtgggacaatacggtgcgtacgacatgccggccccttttatagcggaacatgcttatcgctctagatgtcaaaatgagcaggacaagtgagatgggaaaaaaactgacaaaaagatatttcgacgcagactggatttgaaccaatgcatgcaaagcataagtgataataagaatgaattctaatcactccccttagaccgctcgggcactgcgccatttggtgacagacgacatgtagcataaaaatattcatgcgcactgcggcaatcccgatgtctaggcttctcttatccttctctgtgctcctcgccaatcacgtagatgccagcacatggctcgacttcaggtcagtcgcgcagatgagttgtgaatccaagtgacggtgcaatctgttaattccgctcgccctatcgaccacatcatccctacctgtacgtctttccctctgatgccccggtcttatttactttgtgcaagaccccttccgccgtgcttttcgtcgccttttcccgcaaatttcacgtgactttctcacaaaaagtagcagcgagcgaccctcaacgcgaacaaggtattcatcatcttgctcgaagtcttgtcgatactcgtcgagctcgtcagtaattagtaatcgatctgagttccgtaaccagcttcctcgtatcgaagcctagctcaacgcataacattagaactagctcgtcacacaaatgtccaagcgagccaatgaccaaagcgaagaacgagctgccaagcaggtccgtcaaactaccgacggcctgccggcgcagaaggccgaagatgagggtatgggcgagtttgaggatcagtggggtgacgaggaggagagcgatggcgaggttgtcgaacatgacgccgctgaagatgatgccaacggagatgaggacagtgagtatgggcgttgaggcactgctcgtcgtaccatagtcggccttactgaagcacgattcgatccatagtggagatgatcggcgctatcgaggatgaagagacggaacctgctcagccggaaaaggagccctacatcccaggtgtctctcgaccgctcactgcggaagagattctcgagccggattactctgtctaccttgctctccatcagctcgcctacacctggccttgtctctcgtttgacgtactccgagacgatctcggctgggagaggaacaagttcccgcacaccgcttgggttgtcgcggggactcaatcgggacaggatggagcgagtgatggcatggggaagagtaaggacgaggtggtcgtcatgaagtggggaggtctgagcaggacgcgggccgaggagagcgatgatgaggaagaggacgaggatgtcgacgactatgatgaagacgcccacctggaattcctctcgattcctcataccgggggcgtcaaccgtattcgggcacagaaacaacccagctcgaccggtctccctgcctcgggaaccccttatcacgtcgctacgatggccgagacgggtaaagtccacatcttcgatgtacgacccatgatcgatcagctcgcaagtccatccaccgccttgccccgaactgacaagagcaagcggcctatccacaccatcaccaatcacggcaggaacgaagggttcgccctcgactggtcccctgcctctagctcgacctcggatctccgtctcttgaccggagacatcgcttctcagatctaccacacctccttgacccccaccggattcaacacccagcctaaacctttcctctcccacacctcgtccatcgaagatctccagtggtcaccatcggaaccgaccgtgttcgcttcgtgttcggccgaccgaagcgtacgcgtgtgggacgtcagggtgaagaacaggaagagcgtcacggggatcaccgaggcacacgacgaggatgtgaacgtgatcagctggaacactggggtcgagtatctcttgtgctcgggaggtgacgagggtggcatcaaggtgtgggatttgcgaaacctgaaaggagggtgagtttagcgtgaaatggaaattgtacggaacaacgggatcgaaggctcatgcacgcccttggttgcccttgacgtaacacagactcgcgcagcccgcaccggtcgctcactttacctggcacaacaaacctatcacgtcgatcgaatggcatcctaccgacacgtcagtattgaccgcagcttcagccgacgattcagtctcggtctgggatctgtctgtcgaggccgatgaggaagaggccgctaccaaaaagctcaacgagagcaacggagggatcgtcgtccccccacaactgctgtttgttcatcagggacaaaagcatatcaaagaggttcattggcatgcgcagattcccggtatgatatctaccacggcggcggacggtttcaacattttcaagaccatctctgcctaggctgtcgaagcccttgcccattgccaatctcgtatgaacgcagtgtaccccaatcgtaacccttcattaatatgtatctctacccatgtcatatccgcctcgcctaatgagatattcgattctcaacgagagacgccttgagagcatggggggcatatccatcaggacgcagcgcgtcgcatgatttaccatgacaatctgaatctggctcgacatacataagcattgctttcgatggtgatgttcccaaaggtatgtcaactgaggccaggtcttcggagtgctactgggtaaagtcgcgatactgaggcggctcttgagactgactcccgcgtctcgtcgaacctcgcctgtggccgcgaccacggtatccgctggatgagccggctcgctgagcatacgcgatagcactattgtgggacgcaaaggcgttttcatttccaggttgttgatgcaaatagccggacatccgcacggaggtggtatatcgatgagcctgattgagactgtttggccccgtggcaacggagctcagccgtgcaaaattgttgtgcggatgagcgtttgtgagctccacaggcgctggagaggaagcgaaaagattaaagcgcgattccaaagcctgagatcgcggcaagggcattggttggtgtatgaaaggtgattcgcgacccgggtggacgtagtatgaatggtttggtggttgagatctaggatccatgggtgcttcagaatagggctgattgttgtggctgtggtcgaactcctcgagcttggagcttctcggcgtcgggactaaacctgtcgcgtcgttggcagtgtcgtggaactcgccaaatcggggaaactgtcggtactgcatatcgccggatggatgctgctgccattgagcatgcttttctggcggatggccgccactccatagggggtatagggtggtcggttcggcatgggtgtattgctcttctttcgttgctccgtgcggtatcgtctttttgtactcgagcagctcttcgcggtcatacagcgcatagagaccctgtggagtgtcaatgactcgaatcggctggagctttccgctcgcttgttcggcatgccgggcatcagaagtggcatctcggggcggaccttcctggtacacatgcggtggaccggactggtgtgtcgatcgggagaatcgatatcccgtgatgatcgactgaggcaaatgcagcgctgtttttgccagcgaatcgtgatgtcttacatctgagggagttcgggggaaatcttcgccgacacctagccatccaagtggatgagggatcgtgtccgtctgcgaagggaaaaagggtgcctgttcattcccgccttgtggtaactgtcagggaaacatcagcttagggtatattgattcggcagcaagctcagacctacgtgacgaccgatgctgacatccatttgggttgagggtggaagttgtgtagaaggcggaagcggaacaccatgctggatcgcccaagcctgcaactgcgcaagccgttcagtcgcttctgacaacttgcgggccatctcctcggttctcagagtctggtcgtcaggaacagaaccccagtattgagagtcttgtctctccgatccgtaggttccacgtatagaggggtatatctgggtctcctgttgacaggaggccgtgcgattcctgggatttccctccgccaaggcatcctctagcgccgtctcagatttagaatcgtctgacacgatcacttccgcttccgtcgcaacgggcgtatctcggccaggatcgcttctcgatcgcttgtgttctgtctttgttctgtttgggttgtacccaaagcccatcggacccttgttgaaatctgtcagagatccgcgagagtttcttgagaaactgtcacatagcgatggagaaacgtaactcgtttcctctttcaaggcaacggaggcttgctgctgcggtcgaaacctctagttggtttctttccagccttggttctgggcgaatagagactaacctgaagctcttgatcggcaccactgatcccttcaggctccctctttgtttcgttctcggctaatcgaccagcttctacgctggcagcgtgacgggcagatgcaaccgatgtgaaagatatggttgcggagcgcgaaacaccgtgtgcatcgtcgttgatgtgaacaaccgtctgatttagagagatatgagagccacgctaaattcagggtgaagacaccgattgacttacgattcggccgtaggatttgaagcgctctcgcaccgtctcctctgtttcgtcgctggacaagtcttgtacctctagcgtcatgcgcttgatggccgacccggcctctggagtggctgttcctcgctccaaattacccagcgatacgatcgggaccgctctgttcgtgatcatgcgtctatagttggcgccgctttgctcttggcctggagtgacgactgtacctccgtcattgaggtcgagcggaggtacatcgataagaccgagtgctgataattcagtcgggtcaggatccgacatgttgggattctctgattcgttgagaggaaaatccttccttctcgctgatccgaccattgcctccacccgtacgccgtgatcttctgaccctaatgcagtcacctgcggtcgctccgtaacgtcttgcccatcatagcttgtagcctctcgaggctcctcttttatcgggctaagcactttcagcgtcaacggctgttgggtatcgcatgtcgtggctggtaggctgatgccaggtgtcgagccgtcttttatcgaggtggaaagggtctgactagcttcggagccgtttacgctgggcagagcgggccaatcctcgatattatcactggtcgagcgatgcgtttccctcatgcgaggcggcgcttcattgtgctctttttgggtagaatggtcgaagctcagacctgctgcagtgcgtataccgccagctccgctcctggaaaccaagttcgagttgacagtcaatgaattcgatcctccagaagggtcgggtaaaccgaactgtcgttgtatgaagacacccgcgagaaggcaaagctgttgttgggcccttgctgcggcgttgcggtcggcatacttgacgtcgtagccccgtcgctctcctgatgatcccgcggtgggcaatatggtatcgatatcaccgaagggctcacataacaggcgtatcgcagcttcttcggaagcggatgatgccatgtccaataccaaaggctcttcgatgaagatctgatcaggatagaaagaccgtaccgtttgctctcgttcgcatttcacgactagcacaggatttgccgccaagtcgactctgcaacgaacccaaaacttttggcgtccgtaactatcttgaccgcatggttcgagataccgttcatagaaaaccttgttgggaagaggtctcccccggtgatttccaggcaaagtcgtttccgtggcgtcccacgtcttgttgaggcggacagacagccgcggaaccccttgcacaagttcaattttcaatcggtcctcatgaccgtcgtgcgggtcctcgtcaccccttgccgtctcttgcacgccataacgcaatatcttcgctgctggtttaccgaccaatgatagcgcctgctctcgagtctgccaagacagggcccattttaagcttgaatgtcgatatctgtccactatacagggggcttacttcgagcgctacgaaggcggtatagacaggccctccattgtccgcgatgatcctcctgcagtttaggaataagcgaggtccttcaatggaatacgtaagcgcaagccatctacttacactttctctaccgggaaaaaggcgccaaagtggtccaaaatcatgcgacgcatctcggctactgtgccgtttatctttctcatactaggtgccgtacgtgaagttatgtgagattcggctaaagcagacgaagcagggcgagaatacggacccagtaacaaataaagatctttcataagccggcctgtcacttggcccagggaggacgatgatttcctctccactgtacggatgcttgctgacgaaagctcccctatcagcgtcgtacggtgttatcggatcctcgggtaatttcaccatcgacttggtgagagatatcgatagttttgctgcaggagcacctgaagatggtcgaggataggaatctgcaggattggcagcattgatggaatttcggttatgatgttgcgcacggttggcgagcagcggcagattgctcgaatgggttgtcgaaaatgaccctgcggagccattgttcctctcgacatccaggtatgtatcagtcaaatgctctcctggtgtaagccttttcgaagcaagagcgatgatggcggggctggagtatggtttgtgatcccagtggggagactgtcgctcctgttcggaaggcatcaagatagctgtctgaaacagttaactatggcggtgatcagtatggtatacgatcgaacgacagacgggacgcgttcacctgaggagcgttctcagtggtttcgatccgtggatttctgagcggaacgactccgactatacgatcgccggtatcgatcttcccaatcttagaagcaacgaggacagaaacatctatgtttgaagcctcactgtccgagtcctcactccgagcatccggagaatgagagcgggcaactgtcaaggtcggcttcggcttcgatgtccttggctgcttcttctttcgtttccttggcatcttcgccgactggcctacgcctccccacacacctgttgaatcttccatccagctcttgtcttcaatcgcaagatcagaagcggtggcgacgtcagccggcgactttgtctctggacccgctgcgaccagcttgtcgggcgtgcccggctgcgcagtcgtatcagacggtctggcgggcgaccccttttcgcatagataccagtcgacctcctgccttgctttctcgaccgtccacctcttattaccgttttctgttcttgctagttccaatgcacgaaacttctggaagtatggcgaagagaccgtgttttgagtgggcgatttacaattagggtagcgcttctttaggtcctcgagaactgcacaccaggccagatagaattcggcgtcagtcgtcgcctcggagaccttgatgaaaaggggcgaagaagtgatgacgactctggtcacatgttcatggatccaggacgaggctggattctcgtgcgatactcccctgggcagactttgtctccgaatcgcctcgtgagatgagtcacgtccgaaagctggcccagtgaatctgcttcgctcacgttgcggaccagggcggaatggggcggtttcagatctgtcgcttatggggcacgaatgttgtccgccctctttacctgcatgggcacaaagtatctcttgagggtggttttcgatgtctcccgctcgactgtcgctgagagaagacttttctggtctcctgtggaccgtgtgcatcctgggaagaggagttttgacctgggagagattgacttgcaaggaatcattggttgacgattcgatgtatcctggccccacgggaaccggagccatgtcaatcaattgtctgacagtgcgcggtctcgcttgaatgtctggctcggattctgacgctgactgcaagtcgttcgtttgccgattttttcgttcttggcccgaggaatggtaggggtcagtctcgtccgagccgtctgagctgaagagatcgacgctcagaccgctcccggactcagaatcgccatcatcgcccgagaggatgccagtgtcttgctcgaagtctccctcagcctgttcggactcctcctcaaattcgtcgtcagatcgatctgatgcatccgaatagctctcgtcgctcgctatagcagattcggcaggcagaggaatagtcgacgtgtctttgaagccagaagcgggagagacggatctttctttcggtgagtctgcgttgaggatcatgagtccagcaggagggttagaggcggtcacgcccggcctataagatcctcgttgctcatggtgcttgatgcgggcgttgttccaagcatgagacgcggaagcattgagctgcgtctctgggcgcgcatctatggctagcgctggtgcgagcccatccccgagcctcatgtcgcgaaatgtatgttgactggcctcacgagtgagacccatctgatcaatcctctcgctgagttgcatcatttcgctcaaagacgtgacactgggttcaagctggtggggatagggttcgccaaccagtcggtcggaacgagagggagtgagttgtccggcatcgagacgcgacagccccatccggttcagaccgtagatgggctgcccaggttggtacatggtggcaaagtcacctacgcggtcgacatcggtcatctcgatgtcgcgctggaagtttggctgaaccttttcgcaggaattgcagcggtcatgaccgccatgagcatgagtatgttgcctcgaggtcgaatcccgttccattactccagcggtcaaagcgccgaccatgacgctcgggccctggtgacgcgcacgttcttctggagacatgtactcgtgggcatcgtgtacttcgctcagcttgacagtctggcctatcgacatcctctctcggatacgcgaagcagctttcctctgttcaatttgggcggcggccgcgtcggccgcattcctcgtatcgggagtgacgctcttttctacttgatcctcttcgtcggcagtgctcgacccgctggctttagttttggtagtgacgatgagcgtaggcatgatctcgacatgctcctcgaactgagcgaaggtgtctcgcatgatcctcgctttttccttcatgcggacaaattgcctgttgctagcgatgtgaggcggttcttgcctcatgatcctgtggcccgctcgagcggcttcagcacggtcggcaggaggaggccggtagctaacagcagcgatattacgtttcaccatcggagatctggggtccaccgattgtgtaggtgtccgcttgtatgaggatgtgtcgggactgcgagccggtccttgagattgaatcggcagtcgaggctcggccggtcgcctaacgtggaccttctgaccggaggtttgccgtcgaaacgaaaggattccaatgacacaaacgatcaggattgttttgcaaaggtaagggtacaggtcccgaggatcggatgatgtgggttcggttgtcgtagcaggatattgagcgggggcgagcaggatgaagttgagggacgatgggaaacctgcgggatcttcaaagctactctaggtcgtagcttgacggcggatcgacgtagaaagggttcgaagctaaaagagcagagcaaacaatcagcagtggtagagcgacaactcaataccagtacttcaaacggcatacacgctcgtgtgtctgtagagctgttgaatccggttaccagaaaggtggctgaccctccagccaaatcgattgcgctctgatgcgtgagatcagttgttagctagatcaagctagttgtatctgcgcactgacatgatcgtgagtatatacgaacgaagttgctatagatcaccgatctcaggtttctgaatcgatgatttatcaaggtggcaactgagggaactctcgtcgctgacttcctttgccttgtaattccaggtgtagagtatgcgaattgcagagttttgatgtgagcttacgctagcgatactggcgtgcttgtgatcgttgatgaggggttatacagggagtcggtttgatcttgctgaagagcctggaaacaaggccagtcctgtgatgcgattgcttcgaaagctgtagcttggagagtggcctgcttatatacgatgcggtggcgacgctcctcacggcaaatcatgttcgatgatgagcccgtcgggacgggagaaaggggacagggctgatctaatgtcgcaaaggagaccgcccgccaccaaaggccaaacgaagcgcgggattgatcaaatcagatcgagatcagatcaagaaagctgtgctttctggcctttctggggacctatacctcgtgatcttgtctctcggccgcgtctgcgccttgatcgctcgttattaccccgcggtttcatgccgacatcaacacatcagtcgggatacttctagccccgatggatcgagcatgtccagatttcttgaagacgtgcctcgagggagctgactgtgccgtgcaatcgcatgttgtctcgggcgaagcgaagccgaaaggacggtttgatgcccgcgtgatgcgatggttgattaacgattggaggtccttcgaagttgatggaccaagatctagcgatctggctcttgctcacatatatcctttactgatttactgaacgaaagcctagctgccattcacacgacgtgcctgcccgtgcgtagcgtaagctgtttgttatgtcttcgttccggccgggagcggcgagctgcatcaccactggtcaccgaacattcttgcttctcgattttgctgtggcagacgatccaccaagatgcagatcttttccggactcagcctatgcccgaagaaagctcccgcaaccacacttgggtcccgccaaaacgcaaaagaaacttcttgcgtgtagcacagcatcaggatcgaaccgatgtagatcctcttcggttccgcgaggcgacactcgacaacggatgtctcagatggtcgtccgatgctgaacttcgggtggtttcagcatgttagcgcgatgacggccaaaactgatctacggttcaattttgaggcatgttacccttttcacttcgatcactcctagcctctagcttctcgggcgcttctctatacgagcttcagactgccatacggtacagtattgcagacggcaaattgacacaatcctgaggtcgttgatattgaggaatggatgcttcgtcatactccccgttatctgaccggttgcttccgtcgacctcggccatttggacagcccagcttcgaaatcggcccagacttgtaccattcttctgatgcctgattgtcgtgagtctctcattattattaggatcactgccttcagcattatccgacggatcattcccccttgtccagagatcttctattttcagccgggcgaggtttaggccgaactgaggcaaggaccgcgagctggataggtttcggttaaacccgtcatcccgcagggtaaatcatccggccggaccgtatgtgctatgaaacgtgaacgtgactagcattttgcgcagaagataacaggaatacagcctgatcatccagtgcaaggtacttccggttcgagagattcattcagaacaggtggaattggtcgagatctggacaatcgatgtaggggaagttatggcaggctctgcgatttctgttcgtatgtgtcagtacatctgctggcaggccacagttcattggccatccactggggtcatactgaggtacgcgtccttgatgattttccgctgcggttcctcggctgagggctgcggaagtaggttggttgaagtcgtacgcctgcttgctaatccatcccagatccgacaatcgctcaaccctcctcccacccgaaatgacgccacgactcgtccttgtcgaatgtgcgcagatgtctgggcagacaatcgtcgattcgggtcgcctggcaaagagacgtccagtaggaaaaaaactccccgacacgagggtcggtaccaattgccgagccggaactttccgattggaactggtcgccgcttgcggggtctgcaaagtttgagcggtcacgatcgatgctgctatacgaagaagtggtacgatctgagcggcgatcgatcgagtcagagagtgtacatcatttcgggtctctgatcaatctctgacagccatagatcctggagtatgttgccctttcgtacgtcaaaggcagtcagttcagttcggctgctactccgtcgaggcgttgaagcccggaatgtccggagaaactgcgcgaaaagtctctggcctgtagaacccgcctgacgtgtgcggttgggtcggcgcgtgatgaatcgcctgatcgcccattgggccgtctctccccccccctttccatgccctttgcccggggggggggggggggggaaaggggatcagttgcggttacgaggtatggttcagggaagcgaggcagggtgtgttgagcgacttgatgagagccgaagttgaagcttgaatatggtgagctactgcaggtaatcttctcgacagtacgcggatggcaacgattcctttcattcgacttctgttgctattgtgggatccgtagcgccggccgaccagagacagcggaggaaggtctcggccttcgcagatgaaggatctgcctgccccgtctcccctaagtcgtccgaatgaccttgacgatcccgaatggacgatccggaagtcaaaacgccgcaaacaagacctcgtactcacggccaacccagcctttgcgctcctggtctgcaagaccctcgtctcccccgccgactttgacttgcctcccttctgagccggggtcgtggtgttcgcttccggtgccatatcaaatattggtgggtatctgcctgttatgaaactggtgcagcaattgaaatcagggtgcaagtcagagtgaggagatgttcagcccaaagttgacagtccggtgagtgtagtttgggactctttcaagacgcgtcacgcgtcgcgagatcggcaagaaatcgcataagtctgacggcaactatgcgttatcaagtcgaacacgggagatctcggtagcaattgacggagttttacgggggacgccaccggggccatgcaacatgtatagtaaacccacttcatcatctggtctgtgcgatctgtagtctgtgctggactctttggcgcttggtcaaggtcgtttgggattgtctaggacggagttgatagatcggtgggggggtgtacttttgcttgcccgtcatcgctgcagcctcccgctcatcctttgatcctgaaacggacctctcgcgcgaaaagacccgactcaaaggagggtgagagacggttctagaggaaggcgcacggcgcacagcacagctttcattttcagtttgacaagcgacagaatgatcgtcgatcaacgaaaaggattgatcggacatgtgcgagatccatcagatgacgcgaattcgatgagatctgatcagcgaatcgatcaacttgagaatcgaatgcagggatgtaatctggcatcccgacgtggtcaaagttcaatatcatcctcccttgtattccaatatctctcccttcatacaacggtataaattctcgacgtaccgagcattgtcatccgatagagtgaaaacctcgggcttggtgactatgctttaaggaggacaagtgagcaaagtatccgcgatgcgagaagcatagcccctccccaaacgatctgaccaccaattctctcttagcacctcggtctaccattccgcatcatgtcgctacattctcggccacgttactctacgtctggttcattgaatcgaccgcgaaagattcgtcttcgcatcacctcgcaagcgacccaaacgcgcggtcgacagacgacgtctgacgaggaagaccgcgaaggacttccttcggtggaaacatcaccactctccccactgcctgacgagtacttcaacacgttgtccgcagcttctgaagcgacgtgcattgcagataccatcctatgtcggccttctcctgtcgcaaacttgaacatcaccgctaaacacgcgtccctggaagacgacctcctacccaaccgagcccagcttcaagaagacaaagagaaccgtgatgatcccctggctcgtttatcacaacgacctcatcaccatccttcgactcgcgagctccccgagactccttccaaaccaaatcttaccaagcctcttgttcctaaacgccgcaaccgcacaggtctcgagaaggagatctcccgtttgttcgatttcggtaacatcgggacggatagagccggacgagatgagcgagggaaaagcttgagggggacgaacgtagagcaggagagagagcggaagagactgaaaagaggggagaggtcaggggtgcagagtagtgggaggggattcgtccgtgtgctgtctacgggaagacgtatcgaggacaagcaagatacctcaacgaagacattctggtctaccgagaagactcggctttccccggaagatttcgaaaacgatgaccaggtttacatacacacagggaaggatcctaaactgtctatcggattggaggacgtcgaagcggcgttgacgatgcagtatctcgctagggatgccgagttggggcggcgaggttatcccgccacaaaggttgaaatgccaatgggagtacgagacgagaagactgtgacactagtcagcagcggggagacggagtgtttcctgtcgaagcaagggctcagcttggctagaggggaatgcagcaattgcagagtggacgaggtaaatgtcagccagtctgactcaaagtctgcatggctaacggaacttatccttgtctagacgcaggcaaagttctggtggacggatccggtggtcaaatctgaactgggattagatcgaaggctatgccacgcttgtggtatatacgtgagtctcttcttgaccaacgttcgacgggatcacatccttattcccatgtctgacatagaaatatcacaacttggtcgaccgtccgaacatcttcaaagagacaaaatcgtacacggcaccaatccaaagtcagcctctcccccttaccttccctcagataccactccggagcacaaagcctccctgtcccgatacgacaataaccgaaagcaagactccccctgagtcatccatcggagacattctggaccaatcagactgggtctacatctttccgccagcgtcttacggcttatccatcaaaccttactcggcgtacaagatagtaggcgaacacgattgtagtcgctgggcccagtccggagatgtctggaatcccgacgttcagcatatcagctggagatcaccctgagactggtgaaggttctttaaaattacgattttcgatcacgacaatacgatcagaccaacataggtaaccccccatcaaaagttggcatttatgcaaaagacgccaggccgttgaatctctcacgtcccgatatcatgatacatgtctttcaacgagcgatcggggagatgcaaggccgcgatgctgagggtgtctcggcaagaccggactttcttccaaaggctccagacgggatgcgacctgttcatctgacgaatcggtttcagcaggtaatgacggtaacggagtttggggagccggatgaggtgaaatgggagaataatagctcagtttggaccagcgctctgtcccatcgtccgtgctgcggtattctcccggtgtgtaggatcggttccggccaacaacaacgggcctggcagagacgaatggctggttgggtgcagatgctgatctgttatgtcgcattatggcggtgtcaagtcgcgtgagagagcagccacggatgcgagcggaagtgctcctaaagtgaggcagatctggcagaggagggcgtggtctcgactcgttcggagtcgaacttgggatcgaggctagaggcagttgcaacagaggtggtttccactcggcaaggtgtcgtatgggcgggcggattttctcatctcacttgctggttccacattggtgcgtctgctttcgggtgggactacagcgaacaacgccgaccaaggataaagccacttggaccagcacatgttaaggagaaaataagctaaatttagaatggaggactggatgtcagcgcagcagtccgtttggaaaagtggcgggagaacgtgcgtctgcagatctgttgagggcttcttttacactcacggtacatttcctggtgatcgtcgtcttctgacatgcttggggtttcctgaaaggaggcgtgtgatttgagggaacccctcccccctctaaccgcgcgaaacattttcatcgtagctgaaacgattcccgaggcctctacacaagggaaggacgcctttcggtctgtttgctggaatcgacctgttcgccggtagcgctaggtggcaccgtggtagttctcgatgcggatcagggttcgcagaaacggtgccgccataggtgggttccaacatctcctttgctgcggaactcatcttccgcttatctcggatccttacgaacaccagtaatacgaacatgagcaggaaaagagctcctacaagcgatcccaccacgatgactgacaatggaaggatttcaagtgatgcactcattgaaaccgaggaacggtaccttaccggtcattcgcggatcgttattgacgtggcttatggatcccgcttctaccgacttcgcaggggtcggtaagctggatgtgaaaatattggcgtctgcgtctgccgaatgagcttgtgcgtcttcggtagtgcttccattgagtactcacaatatccggaaggatcatatgacgcgtatatggtagctttggctggaccagaattcggaacggtctgtggagatgggattgaggcgggtgaagatttttgttccgtatcgctaatgggctgtgacgagaagggagcagaagcggattgcgcagggacagtcgttggcgaggtggacgagctggatcgaggggttgttgttgatggcgactgggttgagcgcgtccctgatgcctggagcgtggtaggtgtggagagggttgttgaagatgacatgggaaattcagctgcaggctgcgtgggcagcggaggagggcggtccgagagagtccgatggtcagttgcgattgtgcgtgagccatggcttgtcgtgacctcggacaaagcctgctgagagaccagcggcgggctggttgtaggagtggcgggggatggatccaaggcagtggacgactggataggtctgacaggatcgcgacccagcgacagagatgggataggctgaggttgaggttggttcattattgcgcctttcggagactaggcaatgtcgaacagtcagctcaagagttcttctggctaagctcaagagtttagcaattatcagggatcgcgctgttgcccagccaaactgtgccaactccactgtcgattcgaaacagaagaatccctgcatcctcctttgtagcttgccctagatgcaaataatcgggcaaagggcctggcccttatgcgatagagcgatacatcgtcatcctgtttatcaatacctgatacaatgcgacctacaagacctctcatgatgggtgatggtgggtgggttatagtaaagcttatatgctcgtcggcatgtcctattcgccggtccagccgagaacagacccgctctagtcatgtggaatccgcggatttggcatttcactatgcggcagccttggcaggggtgtagatctcgttgtaaatcatctctgtttgggaagtgcattagcgccgaggtcccagtcggcttctgggagctcctgaactctcacgcttaagggcacttcgactgagctgttctggcgtattatcaaagtcaaagaagtgaggcggcagaggatcggccgacggctcgtcttggtcgtcatggtatggctacgaatgcggaccaatcgagtcagtatacagtgccgggacggacgtcgcgacgaatcagacttgcctcgaggtacggatgagccaacgcttcctgcaccgtcatccgtttactcggtgagaagctgaaggtcgatcgcaaattagcacccaatcaaagtgacatccctaatcagacctgctcacgttaggcatcgttccaagaagtcgatagcgttcggagaagctttggggcaaagcgagcggaaatctcgtcttgttcggaaaggcaaagcccgctatttcaaagtccaacaggcgttagaacccaacgggatccacgaaaaaacatagtggtgcgtaccagatagtctctacgacagagaaagtcaaattcatcagttcctccgtcgaagctcagtctcaatcgattacagtagctcacttggatctagacgaggtgatctcgtgaaaatcgtccatctattggccccacaatgactgacgtgtcagcggactgttcgagcgaactacagatcgaacggtgtgcctctgagctcaccatcggtgtaccgaggacgtccaggattagcgacaattctaagagcgacaaaaggtatgtcagtctgattcgtgttgattcacccgttgccggcgagcgaaggactcacgatgatgataatctcggcccgggaataatggtcttccgttgactggttcgaccgagtgtcagatggtcaattcgatcctaaccctatgcgtatctgcactggcacaagccaacaccgactcactcatctctgccaagatacatccgacgctccacatatcgatcgcctttgtatactctttgaaagctacaaacacgacgaaatcccgtcagcctgtgctccgggtgttgaccagatcgaaccgatcgattgaggccgaccatcgactctactcacagagcatgacctcgggcgcgcggtaccaccttgtcgctacgtattcagtcatgtacgcgttggcgcctacgtccgagtttggctgagcggtcgatcgggccagtccaaagtcgcagatctacggagagtcattcgggatacagagttgacgaggagatgagctttctatctataacgatctgcatgtttccgggaagagggacgggagactgaccttgagatcacagttggcattcaagagcaagttgctaggtttcaggtcccgatggaggacatcggcagtgtgtagcgccttcaaccctcggatcgtctgtgatccccggcgacgaaagtgagtactggtactaacgggaaaccagaccagagggcgacgagacttgcctggtagataaagtattgacaatgatcatcgctcaactcttgcgtcctgatcactcgatgaaggtccgtctccatcaattcctacgagaacgtcaacagatgaaaccaaaatgaaaggaaccgaggtcaggcctgcaataccaatctcgagcgcgagctctacgtcacaactaagctagacttacctggatgaggtagacctccttgaacgaatccaaatcccgcggtcggaggatgtccaagatggcaataatgttttcatgcctgttctctcacccagaaccacagggccatcaggtacgagatcagctgacgaacgacacgccgaggtagcgagtgagctggactcacctgaaatgtttcaagagcttgatttcccgtaaagtccgcatgcagaacatggcatggtcgaacggagtgatacgtttgattgccacctgagttccagtcgggacgtgtacggcggctctgaaaagtgtcgcatgggaggtggttcagacgggtcagtaggtctcgagagggtgaaaccgatgttttcgattgttgttgtgtttgtgagagtgagactgacttgaccacaccataagctccttccccgatcgtgtctaccagcttgtaatacggtcccacttcaaagttgtcgggatcttggtgtacgctcatggtcatcgggatgtcgaggtcgaggtagtgaggttcaggtgtaggcggtgcgtaacgtgagattgtgaagatgctgcaagtattctatgctgtagttctgggtataatatggcagccgatttcctcctgggatgttcggcaaggtgtactctgctgttgtcgtggtcgtcagattcaaaagtatgtgtatgtgtgtgctgtccaactctatcagaccctgtccgatttcgattgtcccttatcccctttcgctcgccatcaccgataccgatgtgtgtgtgtgcgaggctaggtcgatgtgatttctattgttcgcaggatgcagtcggtcatggtgtcaaggtggaggtaccaggcacgcgatacacgatacagccaggttccaagcgagagctgacggcgggcggcacatgcgggagggaagggaagggctgaagatatgattgccgtaatacccttcctggtcctccgtgtggcgtagatgcaacttacgcgagaagacggaatgatccgaagtaccgtcggacgcaagccaaacgagtcgaggtcgaggacgagaacgatggcgatcaccgagaccaccagagcgtcatgatcacctggtctacaccctcttggtcagtggaaacttgatcacaacattcctcctcgccagtcctaccgccagatctgctcgaactcccatcgcatcgctttcggtcacgatgacaatgaaaacaagttgaccctcatcgatatggccacgcaatagcaagcggtccgatgccatgagactccatcggacctcccattaccctgttgagcgtcggtgatatcgtctgtggccatgtcagcaaggcaggaaatctgaaggccaagttcaaatcttctgcaacgtgttcggaccgcgtgcacggcgtcgtggttgccgatggtataaaggcctctagcactattggaaccagcttccggatggcagacgttcgcgtgcaagcaagacgattcgaaccgaccattttcgatatgaaggcgagtttgacgggctcatcgacgggaccgagcgattcgcctgtccagggtacggatccgataggttatcaagagagatcaaatcgagcttctgcttctgtaaacccgcgttcggtgtgatctccagggggacaactgtctctgccagacatcccatcaagcacagcatctgtactgtatacttgccctccaaatgtcttgttgcaagtcccaaagatgaacgcttggtccagatcgcagacccgtgccgaaccgagtcactttgcctcatattgtcatattcgcttggatgtctagacaaacaccaacactccaagtgaaccaggatttctcgctcattgttccatctctcaagttcggaatcgtctaagcggaagcggaagcggcatcaccagcgtctactcaacagacgcacagcaagaaaagaaccttgtcagtcaactttgcacgatcgtacataaccagggcagtctatagaagaggagtgggacataccggtaaccctcttcttgatggcggccgactcctctccaccgaccctgtccaagatctaaaccccgcgaggacccctgactatcagctactacccctgctcatccgactcgtgacatctcatcccgcacacgtatgtgacgtagagaaagaggcttggagaggggactaaccgcgaaaaaggcctggacgtattccttcttggcgtcctcggcgctcttccccttctgggactcccaggcggtccatttgcccctctcggtgaactgcatcatgcccggcttgggggtgttgatgtcgccctcgttggcttgcttgaagagtccgtagaactgcagagccacaaggagagggcataggatcgaggagtcgatcgtcatcacgacgagtccggggcggggatgacagttcaaatatggttcgagaaggaaattttcgtgtgcatcagcctgacaatccggcccggagctccgattctaattctaggtgactgaccaacttctggtcctccaaaccaggcttgaccgcgccatccttggggagagcccggacctccttgacggcggtgtcgaattcagcttgggttcgtgcgctgcaaaatgccgagaatcgaaggcatgtgatcagttgtcgcaccgtgacgatggcccaaaacgggaggagatcgcttactcggccatgattatagtcttgtttggtatcaattcgagttgaggtgattgtggtactgttgatagattgaggtatcgtaaatgttgtctttgatcatacccggttcgatcaagttgtgtttggggagtatgacgagggaagttcggaagcaatcagcatactaggtctaaattcacggacatcgatgtgtttgattggtccggatgtccgcttctaccggatccaaatcgacatggaccatcaccgagcgacctttgggcattcagttcatgaggtgtagatgggctactcactgtacctgtgcacaaactactggggaaaacagcgaggaattcttctactatacagagtaatagcatctactgcggataccaaaatcatccctgggacacgatgacgtccattgaggaatgggtcgaaccagactttcatcaggtcaacctcgacatcgaggctcatcttaagaatgaacggggttacaagctagacgcgggtgagctctcgccatcatacgcaagtcatgatcctgctgctgactccgtctgattaacgtggtagacgaccagatctgtaaagacaatctcgaaccggaaggatgtccccgtggtccagcttgtccgcttcgccataccacccccagccgggccaactttcaaccacccccacctattccctctcacccacgggaccgggaaaaggtcttgaccgtgtgcaagcattatctccgaggactatgtatcatgggcaagaattgcgagtttttgcacgagtacgatttgaggaggttcccagagtgttggtggtggggtacgtatgggttctgttcggccggggacgagtgtctctattatcatccgaaagtcaggaaacgggaatgcgaggattataatcgcggattctgtcggttaggtgagtccttgcaaacagaggggcgacttgaagagtgcgatgtagacgtagctaatctcaatttcgctcgataccatgggacaggcccggaatgtcccaggaagcatattcgacggtcaatgtgtccgttctacatggctggattttgtccagatggtccgcagtgctctatgggccagtaagtcggacgggaattccgagctgaagggatgcctcaattgacccctcgcattgcaaccgtctcgagtagcccgacccccaacctcccatcagctcaagcgtacgacccacctactccgcctctccagaaagacgtcggtccaccaccaccaggctacggtcgatatcacctgtacgaccctctcaaccctgcgcactggcaagtctgggccgggattggcggtagctcgggtgggaggttcggttacaacggcgggcataacgctcctcaggcgatcccgagcaatatcgacgaagccgcacgttcggccgcggtcaatatggctcagaggatgggactacgggatatccctgatgatggaggaagggcgcaaggagggaacttgtggaggtacacggccatggtggaaaagggtctgatcaagcctccaagcgagggaggtaaaggatggaagtcggccgacgaattgaggacggtgacgtgttatgtgagtttgatctccaacgggtgatgcacagtttcagatcgggtcttgtaggctgatttcaacacgctcggcttcgtaatctagcgatgcggagaaaagggacattacgcaacggtctgcccgaatccggtgagtctctgccacattccttagccaccgaaccttgcgtcgcttctcttgctcatctcgccaacctgtgtttgctaggccaaacctggcgatcgtgggggtctgaatcgaagacggaaatggcaagaaggggacccgccactctgatccccctcggcgctacgaggcgcttttcacttggggctggtaccccgattctatccgtgttgtatacgcatctgttcatcatcaccaccatcgtcgtcgttatcatatatcattgtatgatcaactggtctcattacctgggctcggttgtgattaaaagcgcgtcgctagctttccctctctctctctccctctctctccccggaatcatctactttacgcgcgcgcacctgaaccccgagcacccaacttgcacctctaggtcaaatgtcaaagtcaaagtcaggtcaatgtcgtccgtgttaacctgcccctggcttgactcgtagagctacaaccgggttcaatagcatgacgaccatgcaagactcggagacccatccgtcgtcaatgacggcgctcgagctgataagcaacgcgatcccgctgttgcaagagcaggaacgacaacatcaggcacggaaccatgagctgaacggcggtgatcagcatcatcagcagcagcagcaatcacatcactcgctccatctgcttgaacaccaggatgagaccgaaaatgagcatcaagacggatcgatgcagccaatagaacaggagaatggggtggaagacttgttgaatcatcctcaggtgcacgataggattttacaagaggaacacatgttacaacagcaccagttgcacgcccagcagctgcacgctcaacagctcgaacagctcggtcatgctgcctacccgatgcaggataatgctgagctctcgcaagaagagcatcatatgactggacacgagcaacacggtcacgagggagaacaggacgtcgacagggacgaacggacgttggctgagattgccctggattcgcaacacgagcaggacccgcatctacaacaatcgcaacaacagcaacacgctcagcatgaccacgaacatcacccttctcacctcgagccgtcgctggagatgttgggtgcggatcccaacaccatgcccgacgggtacgggatcagccttcgtgatcctcaacgcctggtcgagctcccgggcggactaccactcccactcccgctcgagctcgaccctgggtccatgaacatgcaagacccacaagccggtccgagttccgtaggcgaatcatccgctccctcaatgttcatacccatatcctccgagggtctgcaagtccttggggagtttgagccgatggaattcgagacgttcgatgagctgtacgaggccgtcgcgggaaaggcgcgggagcatgggtttagcgtttcgatctacaacccgacgaggagtaaaaaaggcgtgctacgggctgccaacctgaggtgaggctatggggtgaacgtggtatccatcagccatcccgtccgggcgctgatgaactttggcagatgttcgaaatcgggtaaacaccgcgagacgcggacaaacgagactcggcgtcggaaagctcatacctccaagacggactgtcccttcaacatctacgcccaccggactgaccccatctcgaacaagtttacctttttcgtcaaatcgggcgaacataaccatttgcccgattatagcaagagcgggaaaccgatcaggagaaagatccggtccggtcctatcgtggtgccggggggtacggtgaacgccgcagggacgggaggtggagccgaggtcgaggtcgccggggagacggtcccgcgtgcgaaaaaggcggcgacaaagggcaaggccaagggaaagggcaaggggaaagtcaaggccaagatgttggacgaggaagcttctctgctggctgggttacaagacgcgagctctgcgacttacgggatggaaatggaccatcacgatccgaatgggctcggcgggatgggagggatgatggatggggtcgaagatggatttgttggactggatacgacgaccttgggggatatgggcggagggatgcaagatgcgttggacgaggacggacgggatagagatcgagatcggcatcaccaacacgagcacgagtccggacccgatcatgatcacggcgggtatcaagatcatgatcacgatcacgggcatgaagatccgcagcatcaattgcgccattaccagcaggagcaccaacatcatcccgagcacgagccacaagatgatgcgccgtcgtcccacgatcaccaccttcacctgaatcacgcgtcccacccgcattcgcatcaccaactcgcgcttcactcgtcttatgtagatgccgatcacgaggagaccggcctcgccgaacatccgaatctgagtattgatcctgcgttccagtcgacaatgacgacggatacgagattgggctcgtcttacggggtacatcggggcagcaaggggattgataacgtcagcgatctacggacgagacgagaggtcgggatggacgggtctgagatggagcacgatgaggaacctcagcttcggcatcacgagcacgagcacgagcacgagcatggacaagagggtcatgatccattgaacgggatggaagaggcaggagaaggggaagagcaagatctacatcattatcagcagcaacgacacgagatgaacccggacgaccagccggcggaggatcaactggagatgagcctgaacggagccatggatgcggccgcagcggctgcagggatgggaatggagatgagcatggggatgatggagatggggatggggatggggatgaatttcttgggccagtccgaagatgccggggtggcacccatggagccgtatgcctctgagctcgagcaaccggatgctgaacacgaaacaaatttggctgaggggcaaatagagccagaagaagaggagacgcaggaggagggggaggagcaattggaagagcgtggacggcacgaacagccagaatcgacgtatgtgccggacgaaggggaagggcttcaaccggaagagcaagctgggcaggaaggtgagttggacctagccaattgattcatcatgtccatgtaagaggcgctaacagacggatgtcttactgtggtcgccacttctatagctgctgaatggggacacacggaatgaacatgaggccgaccgctgaagatcgggcacgcaacgttagattatggctgagggccctattcaaagtcgacatggccgctagtcccggcgctagagtggttcattgtatcgtatccacaaatggttgtaccttgaagattactcagtcacgttagtcacatgttttgtatgactatatacctttgcggcgtcgagccggccggatcgaaaggcgacgttttcccgcgtttcatgttcccccgtcccccttttttccccttttgtgtgacgcgtttttgtggttttttgttttttgtcgcgcgctttctggaatttccccgaccaacttctcttttgttcgacgactttggtcgagttggtcgacgtaaagacgacgagacgagatgagatggacatgggacaataataagagtacaatagcgtatcgttcacactcgtccattctgaaacagtcaacgagtactagtacgacgtctagggaatgggattacatatcaaggtcagtcccgggtctcctgccatccgctcgtcgttcttctcgcgtagctactaactaccgcatcgtatctggactccttaaatctactcaacgtactctggcataaacactacgtcgttcttgaaccccactcccttctccgatcgtcaatttgtctcctctacgaacaatcgtccgaggatgctagccaatctatttcgaatcgtcgtctgggccctggcggtcaccgcgatcgacgcggaaaggatccgggatcaatatctctgtacgcccgatgagtgcgtcaggtcggattcggtcgtccagggtgagcgcatcatccttttttcttcttctcccgatacctcatgaattcttgatagctgatacatcccgatctcttgtacgatagtcggaataaagatctcgtcggggaccacgctcaacctcctaccagggacatatacaaacgcctcgcccgctgcccagctcttacccgcctcgcaaccgttcctctccggattctctttccaaatcgaaccctacccaggatccaacttctacttctccctggactcgacatcacggaacgagagcgagagtataggctggccattgatcgtcaccggtccgtcgacacccaccactttcaaacaatcggggtacacttcttctcccaaccttttcagcctagagaataccatctccatctcagatgagtgggactctctctacctcccacctggggtcttcttctccttcccgcccaaactcagcggggtggacccgaggtaccagaacgtcgtgtttcggggtagcgtgcccttacgacaaggactcgggaggcaggtccgttcgttggacctgagtacgagtaaaggggtattcgggagcggtcagtcgatagatcatcccctatgagagcaacgatacatgaaggtgctgatcgagctccttctggcctcccagatgcttgtttccccgcatgcggaccgggtggattatgtctaccttccaacctcgcccctccttccctgaacatatctgatgcctccaatcaaagcaccaacaatcccagcccgaacctccacaacgccttcgtcgtatctttcacctgcgcctgttcccccgggtttgcaggcccgacctgtgacgattgcgctcctgggcatttcggaccagagtgtctggcctgtcccgaccaatgttacagtccaggcgggcagatgaaagggaggtgtgacgatgggttcacaggtacgggaggttgtctaggaagtctgggaaatagcacgcaaggtgagtcgtcgggggtcgacggttcatccatcgtggattctcgttgacgaggataacgacgaacagcgtgtgggtgtgtacacggaacttgtacttcagggaatacctgtgaatgcgcagcgggttggaccgacggagcgggattcaagtgttccgtctgtgcgccgggattcttcctctctagcgaaaatgactgtcaaggtcagtccacctaacgatactaacgagacagcatgaacccaggaggactcatcagccttgaatcggcctggtagcttgtccgttgggcgcgttgacatgccgatcggaaacccaggccacgacgtgctctaaaggttacgctatcaacgtggctaccggaagttgtatacattcaggaggacaagctagttgttccgctggacaatattgggatggatcgacctgttcaacgtgagcgattgatccacccgaccggccgccgatcagacgtcataattgatgtcatctccagctgttcgcctgcgtgtgatacatgcacagggccgggttctgaccaatgtctgaagtgctcgaacccgaggtcagctggtcgctcgtgatttgcccgtgatcgacgacgagcgctgaccttcattctcggcaggttcaacttgaacggaacctgcgtcggatatgacagctcgaacgggatatgcaactctttgttgaccggattgaagggggtctacgtcgccaacaatgtcaaaggtcgttgcgaaggtgagtctggagaacccgtattctttctgtctcgactatgctgataccttacaatcacctatttgtagcctgtccaagtggatgccttgcgtgtgcgattccgtccttttccatcgcctcggtgtggaacgatactctatgtaccgcttgccaagaaggctgggttctgcaagacggtaaatgcgtcgaggaatgtgctgccgggtctttcttgcccgaagggccaccaaatatcaacggcacctgcgaaggtcagttgtcaaccttgacggacggctttgggtatccaattctcacaggtatttcgacttcgctttgcgaaaacagcctgcgacaagacaaaatgcgcctcgtgttacactagtgcgactctctgctcctcctgcgccagacctggcgaatatgcaagcgcgggcgaatgcgtgacaacctgcccaagcggaactatcaaggacgatacgcttggaagatgcgtaccctgcccatcagattgcgcgacttgttccgaagaccggacctgtctctcatgctcgtccataacgccgatcttgagcaagggcaggtgttcggccagttgtcccgtcgcgtcctactgggaagtctccacttcgatgtgcactggctgcgccgacaattgcacgtcctgtacggggcgcgaggtcgaccagtgcgtctcatgcgccaagggatcgctcatgaaggacgaaacctgcacaccagcgtcatgtacgctcgttgagggactgggcatatgcctacgtagcgatttatccaaggaaaagatgtggtggccataccttctagtcattttgcttctctcaatatttggcctgataaccttttggtggatccgacgctctaggcgattgcgccgccaacataccgcggtattcgccgcctctttggatgacaatgcgatcgacaggcgagccaggagagtcggagggatccgcaagatgctcgacaacatgagaatgaacgagaggtcgactgcaagagacagcttccactctctcgatctggtaggaccgcctccggcctacagcgaggacaaaagcgcgtacccagttttcagtataacgcccccatctctaacggtacaaggtcctccccgagccccagcaacccgagaaagatacgatgatgcccatcatgaagcctttgaaactatacgcgaatatcccaatcgagccagtatgacctcaaacgttgccgaggttgtgccgtcgtggtcggctgacaggaaggtcgcactgccggatgaacaggctcgagcacaacacggcatggtctgatggtcgctggtgtcgcatagatggttgtatacggcatagggattatatacatgcgtcggtatcatgccaaccctcgacttgacgggatcatctgtagatcaaaagggagtcgagggccgtgtcgttgctctcgacaaatcgggtgctctctcttccgcaaacgcatcgagaattcgaacgacatccgacgacaagtagcttagttcgatgagctcgtctggtgaaagtgctccctcgctctccttttccgtctgcctcgcagaccctcgtcccattttatcgagttcctcgtcaaacattccaaactcggcctgttcttcttcttcttcttcgtcgttgtcgtcatcgggcgttagagatgctgcgcgtgactcggtcggagccttcctccggagcgcaggcgttctgactcggttcaaatggtcgagaccctcccagacacgtaagaaacagctatcgatcacgattcgcaatctctgaatgtcatccaaggcatccagattgccagtgatgggtagccaatcgtcggcctctgttacgtgaagtccggaaatttagctcctgtggctgggatcatgcttgaggcgagagcggcttaccgagaccattctccaaaactctcatgtgcgacgctccgaataagagataggtcaaggggtctattctcgtcacgtttcgcaattgcttgggggcagacgcggagccctgcatgctggccactttctcctggaaagtataaagtcgtttctcgccgacaaagtcaccatcgccggccatcggggaagcgtcttcgcgctttttgttattgacactaccaacgtgtatcatgcagttctggatggtgacaggatgagcagggtctcgacgcgcggctcctatagtactcacgctatcttgagcagttcgacacatcttggggttggtccgaatagcaaagtttggtatagaaccaatcgagatcaatgccgctttgagcggtaggctatcggcgttgacgtcgaaatcctcaggtacgatcagcaacctcctccgcttgacgtatcgtttgccagtcatcaaggtcaaggcattggcgtgtacaagggcatcatagagttgctcccggatctgctggatgccgagcatcgtaggcttgctcagcaagttgtcattcaagaacttattggcgttgaagtagtccccgcgcgactgcatttcccaccaggcattgaaggcggcttcgacacaaagagcatctgatcggaaatgcttgggcgaccaggagttcttgatttcgttcgactgttcgcgcaaatgaggaggcgcgaggaaggggtctcgactgccgaggatggccgcgatggtgagagctctgggaagcaagcatgatgaatactttcactagcttgacatcgacgtgcgcgtcgactcacggtgaaaggcacttgaagacagtcccaaacaacagcaatttaccaagacgggcatcgcacgggacttgtaaaagaaccttgccgagaggcaaaacgttttgccggctatccaaggctccgagcagtctcaacatggacagagcagcttcgacccgttcttcggcaggaggctcgatcgcctgctgcaaaacatcctcaaccatcccaatattcagggctgcggaggcagaggaacgtgagcaagattgtcaataggcttggaaagttgcactgacctttgacatgcatgacaacctcggacaaatccagtcggagcatttctaccacttgatgggcacgaagagacttcagtcggttcgagccaaataccgcatagtaatcaccaggcctttcacgacctgctcgtcctgctcgctggtccagattcgcgctgcctgcccaagacgtcacgagcgcagagacatgtcgactcgggtcgtaaatcttgagcttggcccggccgctatctacaacaacggtggtgcccggaatggtcaccgatgtttcggcgatattggtcgctaggatgatcctttgcacaccgttcggtgcagccacgaagacttcgcgttgttcagcgactggcgtggtcgaatgcagggtgtgcacgctatacttggtgctatccgtaaagttgacgggtagtggcgaccgacggtcctcgttgagaagcaccttggacactcttttcatctcttccagaccgggtaagctgatgaagtttagctcgattagcattcggcatgctaattgattaccattagctcgactcacaagacgaggacatctgatagcaccgcggatagacaggggaccgttatcagtcggcggaaacactatccgtatgttatgaccggcagactcacgaccggaccgatgcttttgtacgacgtgcgcaatggtcaaggcgataagagggaaaggcaaatcgacttccttctcattgccactctgataacctcctatggcattgtccgcgtctaggtattgcctgactagcttgtcctgttggtcgcgacggcgtgtcaacaaaaggaaagcgcggacgcaataaaggcgacatacctggaacacccagcttccagcagcatttgagcgttgctgcagatcgccgatgaaaccgtccaaatagcttctggtgactggataggtcttgccagggacgtctaccagtggtgccttttggcctcgatcgttcttgaagtagttcctaaatagatcggcgttgatggtcgcactcatcaggaggattttgggcacgtgaagaccggcctcttttcttgtcttcagcattcgtttgagaatgaccagcaggagatccgtgtcgagatctctctcgtgaacctcatcaaggacgatgtgagagaccgagtcgaaccacgtaatttcgttttgatgtgagagcgccgattgtaatcttttcaaaagaataccgatggtcatgaaggctgtgagaggattccggatttagctggatgtacccgtgaaggacggaatacggccttgacttacttatgctaccattgtcttctggcagcttggcgtcgaacctgacgtgatagccgacttctcgacctatttttgaatttcgctcttcagagacccgatctgccaaagccaatgcggcaagctgggcgcgacccaatgtcagcatctgatccggtcgcgtttggcaggaaagcactcactcgtctcggttgggtgaccaagatgcgacaatcggccccctttccagcctggatgtattcgtccaggatgtactgcggtgtctgcgtactctttccggatcccgtgtttgcggttaggctatgggccatcatctcgttagatttttggcacggtgattgcagatccttatgtaacatacacggtgacctcgttctcgtcaatgatcctcaaaatctcctgacgatacgggtagatgggaagcgaagctcgaagttctcgcatctttttcacgctgggagtcttgtcggcctcgtaatcctgcagctggtctaacagtttatcggatcgacttttgagcgctgtcgaaggaggcatcgagaagggttgatgagcgatgaccatgggaggggcgacggtgttcggggtaggcgcctttttgaagaggttggagtttctcgcttcgctgcacagctcgcgcacgagttcgacgagattatcagagcacgtaaaggtcaagtgaggcgcctttcggacgtcctcccccatgctgcctccgccctgcgtgacgaaatggatccagagatcgggatcgcagctctcgaggtattgcgtaacgtcgagataacacagcttggtagcgagtttcttgttggtggccttgcccaccccgatattgcgtcctccaatattcatgatggcttcccacttgctaatcttgagccctcgtttactccgaccctcggtgatcgaatcatacttcagatcgggtttgccgaaacgaaagcggttacaatagtattccacgaagagcctggctttttcgtacgtcacgatcgtaccgtctggaagcttgacggtctcggacgattcttgaggagtcgctgcgccgctgacattgttaccgcctccaccccctgccgagctgcggatgggattgttaatctagatatcgacgtggataatcagcagaaagcatgtacgttaagtctcaaggatcgcctcaccattcgagtcgcaacaagctgatacaacgcacttagagctgcgagcttctccgcttctggctgtttcgagctgtcgccgactccggccaagccgcggtaagcgtctagcacgatgctgaccctgagtaatccagcatagcggcattagcgactggatttcccgctgtgctataggcaacatgggctcggtttacctgtaaatgactttgccgtccaacagtcccttttccatctcgtacggcaccgaaccgtctcccttgcccgctccaaaccaattggcgacgggcgatttcggattctccacccaggcctgtttcacgtccagtctgcctccttgtccaaactcttgcatgatctgttctcgagtcctcatcggcccgctcaaggcggggaggagctcttgctgcctcgtcattcccaaatccttgaccgctcgcccggcagcccgaccacggctcgcgctcctgctcttccctcgaccacctcctcctgatccattctttcctccaagtccgcctcgtccgcgtccactcatgtcgtctaccgcgtgggttgttgaaccgtttctggcgtacgctgatgcttgtccaacgactgcagcgcttccagagcgggaatcgggatggtaatttgtcctgggtgattggacgaaggacgatcggggtcctgtaggtatcgatgtgaagggtcgcgtcgctctaggaccggtaggtacgaccggtttgatctcgaccggttgaatcgtgcgagacgggtattccgtctctactttgcgtcgtttaggtggtggagaatgaagtgcgggttcggaacgctcgcgataatgcctatcgacctctgtgcggtctctctcttgcggtctaatcctgctggggacgtctcggta
